(19) United States
(12) Patent Application Publication
(10) Pub. No.: US 2016/0257948 A1
(43) Pub. Date: Sep. 8, 2016

(54) Methods, Cells & Organisms

(71) Applicant: Kymab Limited, Cambridge (GB)

(72) Inventors: Allan Bradley, Cambridge (GB); Hanif Ali, Cambridge (GB); E-Chiang Lee, Cambridge (GB)

(73) Assignee: Kymab Limited, Cambridge (GB)

(21) Appl. No.: 15/072,794

(22) Filed: Mar. 17, 2016

Related U.S. Application Data
(63) Continuation of application No. PCT/GB2014/052837, filed on Sep. 18, 2014.

(30) Foreign Application Priority Data
Sep. 18, 2013 (GB) 1316560.0
Dec. 2, 2013 (GB) 1321210.5

(51) Int. Cl. C12N 15/10; C12N 15/90; C07K 16/00; A01K 67/027

(52) U.S. Cl. CPC C12N 15/102; A01K 67/0278; C12N 15/907; C07K 16/00; C12N 2800/80; A01K 2207/15; A01K 2227/105; A01K 2267/01; A01K 2217/072; C07K 2317/20

(57) ABSTRACT

The invention relates to an approach for introducing one or more desired insertions and/or deletions of known sizes into one or more predefined locations in a nucleic acid (e.g., in a cell or organism genome). They developed techniques to do this either in a sequential fashion or by inserting a discrete DNA fragment of defined size into the genome precisely in a predefined location or carrying out a discrete deletion of a defined size at a precise location. The technique is based on the observation that DNA single-stranded breaks are preferentially repaired through the HDR pathway, and this reduces the chances of indels (e.g., produced by NHEJ) in the present invention and thus is more efficient than prior art techniques. The invention also provides sequential insertion and/or deletions using single- or double-stranded DNA cutting.

### CROSS-REFERENCE TO RELATED APPLICATIONS

[0001] This application is a continuation application under 35 U.S.C. §120 of co-pending International Application No. PCT/GB2014/052837 filed Sep. 18, 2014, which designated the U.S., and which claims benefit of GB Application No. 1316560.0 filed Sep. 18, 2013, and claims benefit of GB Application No. 1321210.5 filed Dec. 2, 2013 the contents of each of which are incorporated herein by reference in their entireties.

### SEQUENCE LISTING

[0002] The instant application contains a Sequence Listing which has been submitted in ASCII format via EFS-Web and is hereby incorporated by reference in its entirety. Said ASCII copy, created on Feb. 11, 2016, is named K00016-1-Sequence-Listing-069496-086061.txt and is 1,444,445 bytes in size.

[0003] The inventors have devised an approach for introducing one or more desired insertions and/or deletions of known sizes into one or more predefined locations in a nucleic acid (e.g., in a cell or organism genome). They developed techniques to do this either in a sequential fashion or by inserting a discrete DNA fragment of defined size into the genome precisely in a predefined location or carrying out a discrete deletion of a defined size at a precise location. The technique is based on the observation that DNA single-stranded breaks are preferentially repaired through the HDR pathway, and this reduces the chances of indels (e.g., produced by NHEJ) in the present invention and thus is more efficient than prior art techniques.

[0004] The inventors have also devised new techniques termed sequential endonuclease-mediated homology directed recombination (sEHDR) and sequential Cas-mediated homology directed recombination (sCHDR).

### BACKGROUND

[0005] Certain bacterial and archaea strains have been shown to contain highly evolved adaptive immune defence systems, CRISPR/Cas systems, which continually undergo reprogramming to direct degradation of complementary sequences present within invading viral or plasmid DNA. Short segments of foreign DNA, called spacers, are incorporated into the genome between CRISPR repeats, and serve as a ‘memory’ of past exposures. CRISPR spacers are then used to recognize and silence exogenous genetic elements in a manner analogous to RNAi in eukaryotic organisms.

[0006] The Clustered Regularly Interspaced Short Palindromic Repeats (CRISPR) system including the CRISPR associated (Cas) protein has been reconstituted in vitro by a number of research groups allowing for the DNA cleavage of almost any DNA template without the caveat of searching for the right restriction enzyme cutter. The CRISPR/Cas system also offers a blunt end cleavage creating a dsDNA or, using mutated Cas versions, a selective single strand-specific cleavage (see Cong et al., Wang et al. & Mali et al. cited below).

[0007] Through in vitro studies using Streptococcus pyogenes type II CRISPR/Cas system it has been shown that the only components required for efficient CRISPR/Cas-mediated target DNA or genome modification are a Cas nuclease (e.g., a Cas9 nuclease), CRISPR RNA (crRNA) and trans-activating crRNA (tracrRNA). The wild-type mechanism of CRISPR/Cas-mediated DNA cleavage occurs via several steps. Transcription of the CRISPR array, containing small fragments (20-30 base-pairs) of the encountered (or target) DNA, into pre-crRNA, which undergoes maturation through the hybridisation with tracrRNA via direct repeats of pre-crRNA. The hybridisation of the pre-crRNA and tracrRNA, known as guide RNA (gRNA or sgRNA), associates with the Cas nuclease forming a ribonucleoprotein complex, which mediates conversion of pre-crRNA into mature crRNA. Mature crRNA:tracrRNA duplex directs Cas9 to the DNA target consisting of the protospacer and the requisite protospacer adjacent motif (CRISPR/cas protospacer-adjacent motif; PAM) via heteroduplex formation between the spacer region of the crRNA and the protospacer DNA on the host genome. The Cas9 nuclease mediates cleavage of the target DNA upstream of PAM to create a double-stranded break within the protospacer or a strand-specific nick using mutated Cas9 nuclease whereby one DNA strand-specific cleavage motif is mutated (for example, Cas9 nickase contains a D10A substitution) (Cong et al.).

[0008] It is worth noting that different strains of Streptococcus have been isolated which use PAM sequences that are different from that used by Streptococcus pyogenes Cas9. The latter requires a NGG PAM sequence. CRISPR/Cas systems (for example, the Csy4 endoribonulcease in Pseudomonas aeroginosa (see Shah et al.) have been described in other prokaryotic species, which recognise a different PAM sequence (e.g., CCN, TCN, TTC, AWG, CC, NNAGNN, NGG, NGGNG). It is noteworthy that the Csy4 (also known as Cas6f) has no sequence homology to Cas9 but the DNA cleavage occurs through a similar mechanism involving the assembly of a Cas-protein-crRNA complex that facilitates target DNA recognition leading to specific DNA cleavage (Haurwitz et al.).

[0009] In vitro-reconstituted type II CRISPR/Cas system has been adapted and applied in a number of different settings. These include creating selective gene disruption in single or multiple genes in ES cells and also single or multiple gene disruption using a one-step approach using zygotes to generate biallelic mutations in mice. The speed, accuracy and the efficiency at which this system could be applied to genome editing in addition to its multiplexing capability makes this system vastly superior to its predecessor genome editing technologies namely zinc finger nucleases (ZFNs), transcription activator-like effector nucleases (TALENs) and engineered homing meganucleases (Gaj et al. & Perez-Pinera et al.). These have been successfully used in various eukaryotic hosts but they all suffer from important limitations; notably off-target mutagenesis leading to nuclease-related toxicity, and also the time and cost of developing such engineered proteins. The CRISPR/Cas system on the other hand is a superior genome editing system by which mutations can be introduced with relative ease, simply by designing a single guided RNA complementary to the protospacer sequence on the target DNA.

[0010] The dsDNA break induced by an endonuclease, such as Cas9, is subsequently repaired through non-homologous end joining mechanism (NHEJ), whereby the subsequent DNA repair at the breakpoint junction is stitched together with different and unpredictable inserted or deletions (indels) of varying size. This is highly undesirable when precise nucleic acid or genome editing is required. However a predefined precise mutation can be generated using homology directed repair (HDR), e.g., with the inclusion of a donor oligo or donor DNA fragment. This approach with Cas9 nuclease has been shown to generate precise predefined mutations but the efficiency at which this occurs in both alleles is low and mutation is seen in one of the strands of the dsDNA target (Wang et al.).

[0011] The CRISPR/Cas system does therefore have some limitations in its current form. While it may be possible to modify a desired sequence in one strand of dsDNA, the sequence in the other strand is often mutated through undesirable NHEJ.

### SUMMARY OF THE INVENTION

[0012] A first configuration of the present invention provides:—

[0013] A method of nucleic acid recombination, the method comprising providing dsDNA comprising first and second strands and
[0014] (a) using nucleic acid cleavage to create 5′ and 3′ cut ends in the first strand;
[0015] (b) using homologous recombination to insert a nucleotide sequence between the ends, thereby producing a modified first strand; thereby producing DNA wherein the first strand has been modified by said recombination but the second strand has not been modified; and
[0016] (c) optionally replicating the modified first strand to produce a progeny dsDNA wherein each strand thereof comprises a copy of the inserted nucleotide sequence; and isolating the progeny dsDNA.
   A second configuration of the present invention provides:—

[0017] A method of nucleic acid recombination, the method comprising
[0018] (a) using nucleic acid cleavage to create 5′ and 3′ cut ends in a single nucleic acid strand;
[0019] (b) using homologous recombination to insert a nucleotide sequence between the ends, wherein the insert sequence comprises a regulatory element or encodes all or part of a protein; and
[0020] (c) optionally obtaining the nucleic acid strand modified in step (b) or a progeny nucleic strand comprising the inserted nucleotide sequence.
   A third configuration of the present invention provides:—

[0021] A method of nucleic acid recombination, the method comprising
[0022] (a) using nucleic acid cleavage to create first and second breaks in a nucleic acid strand, thereby creating 5′ and 3′ cut ends and a nucleotide sequence between the ends;
[0023] (b) using homologous recombination to delete the nucleotide sequence; and
[0024] (c) optionally obtaining the nucleic acid strand modified in step (b) or a progeny nucleic strand comprising the deletion.
   A fourth configuration of the present invention provides:—

[0025] A method of nucleic acid recombination, the method comprising providing dsDNA comprising first and second strands and
[0026] (a) using Cas endonuclease-mediated nucleic acid cleavage to create a cut end in the first strand 3′ of a PAM motif;
[0027] (b) using Cas endonuclease-mediated nucleic acid cleavage to create a cut in the second strand at a position which corresponds to a position 3′ of the cut end of the strand of part (a), which cut is 3′ of the PAM motif;
[0028] (c) providing a first gRNA which hybridises with a sequence 5′ to the PAM motif in the strand of part (a)
[0029] (d) providing a second gRNA which hybridises with a sequence 5′ to the PAM motif in the strand of part (b)
   [0030] wherein the nucleic acid strands of part (a) and part (b) are repaired to produce a deletion of nucleic acid between the cuts.

[0031] In aspects of the configurations of the invention there is provided a method of sequential endonuclease-mediated homology directed recombination (sEHDR) comprising carrying out the method of any preceding configuration a first time and carrying out the method of any preceding configuration a second time. In this way, the invention enables serial nucleic acid modifications, e.g., genome modifications, to be carried out, which may comprise precise sequence deletions, insertions or combinations of these two or more times. For example, it is possible to use this aspect of the invention to “walk along” nucleic acids (e.g., chromosomes in cells) to make relatively large and precise nucleotide sequence deletions or insertions. In an embodiment, one or more Cas endonucleases (e.g., a Cas9 and/or Cys4) is used in a method of sequential Cas-mediated homology directed recombination (sCHDR).

[0032] In another aspect, the invention can be described according to the numbered sentences below:
[0033] 1. A method of nucleic acid recombination, the method comprising providing dsDNA comprising first and second strands and
[0034] (a) using nucleic acid cleavage to create 5′ and 3′ cut ends in the first strand;
[0035] (b) using homologous recombination to insert a nucleotide sequence between the ends, thereby producing a modified first strand; thereby producing DNA wherein the first strand has been modified by said recombination but the second strand has not been modified; and
[0036] (c) optionally replicating the modified first strand to produce a progeny dsDNA wherein each strand thereof comprises a copy of the inserted nucleotide sequence; and isolating the progeny dsDNA.

[0037] 2. A method of nucleic acid recombination, the method comprising
[0038] (a) using nucleic acid cleavage to create 5′ and 3′ cut ends in a single nucleic acid strand;
[0039] (b) using homologous recombination to insert a nucleotide sequence between the ends, wherein the insert sequence comprises a regulatory element or encodes all or part of a protein; and
[0040] (c) optionally obtaining the nucleic acid strand modified in step (b) or a progeny nucleic strand comprising the inserted nucleotide sequence.

[0041] 3. The method of any preceding sentence, wherein the insert sequence replaces an orthologous or homologous sequence of the strand.

[0042] 4. The method of any preceding sentence, wherein the insert nucleotide sequence is at least 10 nucleotides long.

[0043] 5. The method of any preceding sentence, wherein the insert sequence comprises a site specific recombination site.

[0044] 6. A method of nucleic acid recombination, the method comprising
[0045] (a) using nucleic acid cleavage to create first and second breaks in a nucleic acid strand, thereby creating 5′ and 3′ cut ends and a nucleotide sequence between the ends;
[0046] (b) using homologous recombination to delete the nucleotide sequence; and
[0047] (c) optionally obtaining the nucleic acid strand modified in step (b) or a progeny nucleic strand comprising the deletion.

[0048] 7. The method of sentence 6, wherein the deleted sequence comprises a regulatory element or encodes all or part of a protein.

[0049] 8. The method of any preceding sentence, wherein step (c) is performed by isolating a cell comprising the modified first strand, or by obtaining a non-human vertebrate in which the method has been performed or a progeny thereof.

[0050] 9. The method of any preceding sentence, wherein the nucleic acid strand or the first strand is a DNA strand.

[0051] 10. The method of any preceding sentence wherein the product of the method comprises a nucleic acid strand comprising a PAM motif 3′ of the insertion or deletion.

[0052] 11. The method of any preceding sentence, wherein step (b) is performed by carrying out homologous recombination between an incoming nucleic acid comprising first and second homology arms, wherein the homology arms are substantially homologous respectively to a sequence extending 5′ from the 5′ end and a sequence extending 3′ from the 3′ end.

[0053] 12. The method of sentence 11, wherein step (b) is performed by carrying out homologous recombination between an incoming nucleic acid comprising an insert nucleotide sequence flanked by the first and second homology arms, wherein the insert nucleotide sequence is inserted between the 5′ and 3′ ends.

[0054] 13. The method of sentence 12, wherein the insert is as recited in any one of sentences 3 to 5 and there is no further sequence between the homology arms.

[0055] 14. The method of any one of sentences 11 to 13, wherein each homology arm is at least 20 contiguous nucleotides long.

[0056] 15. The method of any one of sentences 11 to 14, wherein the first and/or second homology arm comprises a PAM motif.

[0057] 16. The method of any preceding sentence, wherein Cas endonuclease-mediated cleavage is used in step (a); optionally by recognition of a GG or NGG PAM motif.

[0058] 17. The method of sentence 16, wherein a nickase is used to cut in step (a).

[0059] 18. The method of any preceding sentence, wherein the method is carried out in a cell. e.g. a eukaryotic cell.

[0060] 19. The method of sentence 18, wherein the method is carried out in a mammalian cell.

[0061] 20. The method of sentence 18, wherein the cell is a rodent (e.g., mouse) ES cell or zygote.

[0062] 21. The method of any preceding sentence, wherein the method is carried out in a non-human mammal, e.g. a mouse or rat or rabbit.

[0063] 22. The method of any preceding sentence, wherein each cleavage site is flanked by PAM motif (e.g., a NGG or NGGNG sequence, wherein N is any base and G is a guanine).

[0064] 23. The method of any preceding sentence, wherein the 3′ end is flanked 3′ by a PAM motif.

[0065] 24. The method of any preceding sentence, wherein step (a) is carried out by cleavage in one single strand of dsDNA.

[0066] 25. The method of any preceding sentence, wherein step (a) is carried out by combining in a cell the nucleic acid strand, a Cas endonuclease, a crRNA and a tracrRNA (e.g., provided by one or more gRNAs) for targeting the endonuclease to carry out the cleavage, and optionally an insert sequence for homologous recombination with the nucleic acid strand.

[0067] 26. The method of any preceding sentence, wherein step (b) is performed by carrying out homologous recombination with an incoming nucleic acid comprising first and second homology arms, wherein the homology arms are substantially homologous respectively to a sequence extending 5′ from the 5′ end and a sequence extending 3′ from the 3′ end, wherein the second homology arm comprises a PAM sequence such that homologous recombination between the second homology arm and the sequence extending 3′ from the 3′ end produces a sequence comprising a PAM motif in the product of the method.

[0068] 27. A method of sequential endonuclease-mediated homology directed recombination (sEHDR) comprising carrying out the method of any preceding sentence (e.g., when according to sentence 1 using a nickase to cut a single strand of dsDNA; or when dependent from sentence 2 or 5 using a nuclease to cut both strands of dsDNA) a first time and a second time, wherein endonuclease-mediated cleavage is used in each step (a); wherein the product of the first time is used for endonuclease-mediated cleavage the second time, whereby either (i) first and second nucleotide sequences are deleted the first time and the second times respectively; (ii) a first nucleotide sequence is deleted the first time and a second nucleotide sequence is inserted the second time, (iii) a first nucleotide sequence is inserted the first time and a second nucleotide sequence is deleted the second time; or (iv) first and second nucleotide sequences are inserted the first and second times respectively; optionally wherein the nucleic acid strand modification the second time is within 20 or less nucleotides of the nucleic acid strand modification the first time.

[0069] 28. The method of sentence 27, wherein the first time is carried out according to claim 6, wherein the incoming nucleic acid comprises no sequence between the first and second homology arms, wherein sequence between the 5′ and 3′ ends is deleted by homologous recombination; and/or the second time is carried out according to sentence 6, wherein step (b) is performed by carrying out homologous recombination between an incoming nucleic acid comprising first and second homology arms, wherein the homology arms are substantially homologous respectively to a sequence extending 5′ from the 5′ end and a sequence extending 3′ from the 3′ end, wherein the incoming nucleic acid comprises no sequence between the first and second homology arms such that sequence between the 5′ and 3′ ends is deleted by homologous recombination; optionally wherein the second arm comprises a PAM motif such that the product of the second time comprises a PAM motif for use in a subsequent Cas endonuclease-mediated method according to any one of sentences 1 to 26.

[0070] 29. The method of sentence 27, wherein the first time is carried out according to sentence 1 or 2, wherein the incoming nucleic acid comprises the insert sequence between the first and second homology arms, wherein the insert sequence is inserted between the 5′ and 3′ ends by homologous recombination; and/or the second time is carried out according to sentence 1 or 2, wherein step (b) is performed by carrying out homologous recombination between an incoming nucleic acid comprising first and second homology arms, wherein the homology arms are substantially homologous respectively to a sequence extending 5′ from the 5′ end and a sequence extending 3′ from the 3′ end, wherein the insert sequence is inserted between the 5′ and 3′ ends by homologous recombination; optionally wherein the second arm comprises a PAM motif such that the product of the second time comprises a PAM motif for use in a subsequent Cas endonuclease-mediated method according to any one of sentences 1 to 26.

[0071] 30. The method of sentence 27, wherein one of said first and second times is carried out as specified in sentence 28 and the other time is carried out as specified in sentence 29, wherein at least one sequence deletion and at least one sequence insertion is performed.

[0072] 31. The method of any preceding sentence, wherein step (a) is carried out using Cas endonuclease-mediated cleavage and a gRNA comprising a crRNA and a tracrRNA.

[0073] 32. The method of sentence 25 or 31, wherein the crRNA has the structure 5′-X-Y-3′, wherein X is an RNA nucleotide sequence (optionally at least 5 nucleotides long) and Y is a crRNA sequence comprising a nucleotide motif that hybridises with a motif comprised by the tracrRNA, wherein X is capable of hybridising with a nucleotide sequence extending 5′ from the desired site of the 5′ cut end.

[0074] 33. The method of sentence 25, 31 or 32, wherein Y is 5′-NIUUUUAN2N3GCUA-3′ (SEQ ID NO:3), wherein each of N1-3 is a A, U, C or G and/or the tracrRNA comprises the sequence (in 5′ to 3′ orientation) UAGCM1UUAAAAM2 (SEQ ID NO:4), wherein M1 is spacer nucleotide sequence and M2 is a nucleotide.

[0075] 34. A method of producing a cell or a transgenic non-human organism, the method comprising

[0076] (a) carrying out the method of any preceding claim to (i) knock out a target nucleotide sequence in the genome of a first cell and/or (ii) knock in an insert nucleotide sequence into the genome of a first cell, optionally wherein the insert sequence replaces a target sequence in whole or in part at the endogenous location of the target sequence in the genome; wherein the cell or a progeny thereof can develop into a non-human organism or cell; and

[0077] (b) developing the cell or progeny into a non-human organism or a non-human cell.

[0078] 35. The method of sentence 34, wherein the organism or cell is homozygous for the modification (i) and/or (ii).

[0079] 36. The method of sentence 34 or 35, wherein the cell is an ES cell, iPS cell, totipotent cell or pluripotent cell.

[0080] 37. The method of any one of sentences 34 to 36, wherein the cell is a rodent (e.g., a mouse or rat) cell.

[0081] 38. The method of any one of sentences 34 to 37, wherein the target sequence is an endogenous sequence comprising all or part of a regulatory element or encoding all or part of a protein.

[0082] 39. The method of any one of sentences 34 to 38, wherein the insert sequence is a synthetic sequence; or comprises a sequence encoding all or part of a protein from a species other than the species from which the first cell is derived; or comprises a regulatory element from said first species.

[0083] 40. The method of sentence 39, wherein the insert sequence encodes all or part of a human protein or a human protein subunit or domain.

[0084] 41. A cell or a non-human organism whose genome comprises a modification comprising a non-endogenous nucleotide sequence flanked by endogenous nucleotide sequences, wherein the cell or organism is obtainable by the method of any one of sentences 24 to 40 and wherein the non-endogenous sequence is flanked 3′ by a Cas PAM motif; wherein the cell is not comprised by a human; and one, more or all of (a) to (d) applies

[0085] (a) the genome is homozygous for the modification; or comprises the modification at one allele and is unmodified by Cas-mediated homologous recombination at the other allele;

[0086] (b) the non-endogenous sequence comprises all or part of a regulatory element or encodes all or part of a protein;

[0087] (c) the non-endogenous sequence is at least 20 nucleotides long;

[0088] (d) the non-endogenous sequence replaces an orthologous or homologous sequence in the genome.

[0089] 42. The cell or organism of sentence 41, wherein the non-endogenous sequence is a human sequence.

[0090] 43. The cell or organism of sentence 41 or 42, wherein the PAM motif comprises a sequence selected from CCN, TCN, TTC, AWG, CC, NNAGNN, NGGNG GG, NGG, WGG, CWT, CTT and GAA.

[0091] 44. The cell or organism of any one of sentences 41 to 43, wherein there is a PAM motif no more than 10 nucleotides (e.g., 3 nucleotides) 3′ of the non-endogenous sequence.

[0092] 45. The cell or organism of any one of sentences 41 to 44, wherein the PAM motif is recognised by a Streptococcus Cas9.

[0093] 46. The cell or organism of any one of sentences 41 to 45, which is a non-human vertebrate cell or a non-human vertebrate that expresses one or more human antibody heavy chain variable domains (and optionally no heavy chain variable domains of a non-human vertebrate species).

[0094] 47. The cell or organism of any one of sentences 41 to 46, which is a non-human vertebrate cell or a non-human vertebrate that expresses one or more human antibody kappa light chain variable domains (and optionally no kappa light chain variable domains of a non-human vertebrate species).

[0095] 48. The cell or organism of any one of sentences 41 to 47, which is a non-human vertebrate cell or a non-human vertebrate that expresses one or more human antibody lambda light chain variable domains (and optionally no kappa light chain variable domains of a non-human vertebrate species).

[0096] 49. The cell or organism of any one of sentences 46 to 48, wherein the non-endogenous sequence encodes a human Fc receptor protein or subunit or domain thereof (e.g., a human FcRn or Fcγ receptor protein, subunit or domain).

[0097] 50. The cell or organism of any one of sentences 41 to 48, wherein the non-endogenous sequence comprises one or more human antibody gene segments, an antibody variable region or an antibody constant region.

[0098] 51. The cell or organism of any one of sentences 41 to 50, wherein the insert sequence is a human sequence that replaces or supplements an orthologous non-human sequence.

[0099] 52. A monoclonal or polyclonal antibody prepared by immunisation of a vertebrate (e.g., mouse or rat) according to any one of sentences 41 to 51 with an antigen.

[0100] 53. A method of isolating an antibody that binds a predetermined antigen, the method comprising

[0101] (a) providing a vertebrate (optionally a mouse or rat) according to any one of sentences 41 to 51;

[0102] (b) immunising said vertebrate with said antigen:

[0103] (c) removing B lymphocytes from the vertebrate and selecting one or more B lymphocytes expressing antibodies that bind to the antigen;

[0104] (d) optionally immortalising said selected B lymphocytes or progeny thereof, optionally by producing hybridomas therefrom; and

[0105] (e) isolating an antibody (e.g., and IgG-type antibody) expressed by the B lymphocytes.

[0106] 54. The method of sentence 53, comprising the step of isolating from said B lymphocytes nucleic acid encoding said antibody that binds said antigen; optionally exchanging the heavy chain constant region nucleotide sequence of the antibody with a nucleotide sequence encoding a human or humanised heavy chain constant region and optionally affinity maturing the variable region of said antibody; and optionally inserting said nucleic acid into an expression vector and optionally a host.

[0107] 55. The method of sentence 53 or 54, further comprising making a mutant or derivative of the antibody produced by the method of claim 53 or 54.

[0108] 56. The use of an isolated, monoclonal or polyclonal antibody according to sentence 52, or a mutant or derivative antibody thereof that binds said antigen, in the manufacture of a composition for use as a medicament.

[0109] 57. The use of an isolated, monoclonal or polyclonal antibody according to sentence 52, or a mutant or derivative antibody thereof that binds said antigen for use in medicine.

[0110] 58. A nucleotide sequence encoding an antibody of sentence 52, optionally wherein the nucleotide sequence is part of a vector.

[0111] 59. A pharmaceutical composition comprising the antibody or antibodies of sentence 52 and a diluent, excipient or carrier.

[0112] 60. An ES cell, a eukaryotic cell, a mammalian cell, a non-human animal or a non-human blastocyst comprising an expressible genomically-integrated nucleotide sequence encoding a Cas endonuclease.

[0113] 61. The cell, animal or blastocyst of sentence 60, wherein the endonuclease sequence is constitutively expressible.

[0114] 62. The cell, animal or blastocyst of sentence 60, wherein the endonuclease sequence is inducibly expressible.

[0115] 63. The cell, animal or blastocyst of sentence 60, 61 or 62, wherein the endonuclease sequence is expressible in a tissue-specific or stage-specific manner in the animal or a progeny thereof, or in a non-human animal that is a progeny of the cell or blastocyst.

[0116] 64. The cell or animal of sentence 63, wherein the cell is a non-human embryo cell or the animal is a non-human embryo, wherein the endonuclease sequence is expressible or expressed in the cell or embryo.

[0117] 65. The cell of animal sentence 64, wherein the endonuclease is operatively linked to a promoter selected from the group consisting of an embryo-specific promoter (e.g., a Nanog promoter, a Pou5fl promoter or a SoxB promoter).

[0118] 66. The cell, animal or blastocyst of any one of sentences 60 to 65, wherein the Cas endonuclease is at a Rosa 26 locus.

[0119] 67. The cell, animal or blastocyst of any one of sentences 60 to 65, wherein the Cas endonuclease is operably linked to a Rosa 26 promoter.

[0120] 68. The cell, animal or blastocyst of any one of sentences 60 to 63, w5erein the Cas endonuclease sequence is flanked 5′ and 3′ by transposon elements (e.g., inverted piggyBac terminal elements) or site-specific recombination sites (e.g., loxP and/or a mutant lox, e.g., lox2272 or lox511; or frt).

[0121] 69. The cell, animal or blastocyst of sentence 68, comprising one or more restriction endonuclease sites between the Cas endonuclease sequence and a transposon element.

[0122] 70. The cell, animal or blastocyst of any one of sentences 60 to 69 comprising one or more gRNAs.

[0123] 71. The cell, animal or blastocyst of sentence 68, 69 or 70, wherein the gRNA(s) are flanked 5′ and 3′ by transposon elements (e.g., inverted piggyBac terminal elements) or site-specific recombination sites (e.g., loxP and/or a mutant lox, e.g., lox2272 or lox511 or frt).

[0124] 72. Use of the cell, animal or blastocyst of any one of sentences 60 to 71 in a method according to any one of sentences 1 to 51 or 73.

[0125] 73. A method of nucleic acid recombination, the method comprising providing dsDNA comprising first and second strands and

[0126] (a) using Cas endonuclease-mediated nucleic acid cleavage to create a cut end in the first strand 3′ of a PAM motif;

[0127] (b) using Cas endonuclease-mediated nucleic acid cleavage to create a cut in the second strand at a position which corresponds to a position 3′ of the cut end of the strand of part (a), which cut is 3′ of the PAM motif:

[0128] (c) providing a first gRNA which hybridises with a sequence 5′ to the PAM motif in the strand of part (a)

[0129] (d) providing a second gRNA which hybridises with a sequence 5′ to the PAM motif in the strand of part (b) wherein the nucleic acid strands of part (a) and part (b) are repaired to produce a deletion of nucleic acid between the cuts.

[0130] 74. The method of sentence 6, wherein the deleted sequence comprises a regulatory element or encodes all or part of a protein.

[0131] 75. The method of sentence 73 or 74, wherein Cas endonuclease-mediated cleavage is used in step (a) or in step (b) is by recognition of a GG or NGG PAM motif.

[0132] 76. The method of sentence 75, wherein a nickase is used to cut in step (a) and/or in step (b).

[0133] 77. The method of sentence 73 or 74 wherein a nuclease is used to cut in step (a) and/or in step (b).

[0134] 78. The method of any one of sentences 74 to 77, wherein the method is carried out in a cell, e.g. a eukaryotic cell.

[0135] 79. The method of sentence 78, wherein the method is carried out in a mammalian cell.

[0136] 80. The method of sentence 78, wherein the cell is a rodent (e.g., mouse) ES cell or zygote.

[0137] 81. The method of any one of sentences 74 to 80, wherein the method is carried out in a non-human mammal, e.g. a mouse or rat or rabbit.

[0138] 82. The method of any one of sentences 74 to 81, wherein each cleavage site is flanked by PAM motif (e.g., a NGG or NGGNG sequence, wherein N is any base and G is a guanine).

[0139] 83. Use of a first and second gRNA to target a desired part of the nucleic acid, defining the region to be deleted, in a method according to any one of sentences 74 to 82.

### BRIEF DESCRIPTION OF THE FIGURES

[0140] FIG. 1A. Precise DNA Insertion in a Predefined Location (KI): gRNA designed against a predefined location can induce DNA nick using Cas9 D10A nickase 5′ of the PAM sequence (shown as solid black box). Alternatively, gRNA can be used together with Cas9 wild-type nuclease to induce double-stranded DNA breaks 5′ of the PAM sequence. The addition of a donor oligo or a donor DNA fragment (single or double stranded) with homology around the breakpoint region containing any form of DNA alterations including addition of endogenous or exogenous DNA can be precisely inserted at the breakpoint junction where the DNA is repaired through HDR.

[0141] FIG. 1B. Precise DNA Insertion in a Predefined Location (KI): This figure shows a more detailed description of the mechanism described in FIG. 1A. sgRNA designed against a predefined location can induce DNA nick using Cas9 D10A nickase 5′ of the PAM sequence (shown as solid black box). Alternatively, sgRNA can be used together with Cas9 wild-type nuclease to induce double-stranded DNA breaks 5′ of the PAM sequence. The addition of a donor oligo or a donor DNA fragment (single or double stranded) with homology arms (HA) around the breakpoint region containing any form of DNA alterations including addition of endogenous or exogenous DNA, can be precisely inserted at the breakpoint junction where the DNA is repaired through HDR.

[0142] FIG. 2A. Precise DNA Deletion (KO): gRNAs targeting flanking region of interest can induce two DNA nicks using Cas9 D10A nickase in predefine locations containing the desired PAM sequences (shown as solid black box). Alternatively, gRNAs can be used with Cas9 wild-type nuclease to induce two DSB flanking the region of interest. Addition of a donor oligo or a donor DNA fragment (single or double stranded) with homology to region 5′ of PAM 1 and 3′ of PAM 2 sequence will guide DNA repair in a precise manner via HDR. DNA repair via HDR will reduce the risk of indel formation at the breakpoint junctions and avoid DNA repair through NHEJ and in doing so, it will delete out the region flanked by the PAM sequence and carry out DNA repair in a pre-determined and pre-defined manner.

[0143] FIG. 2B. Precise DNA Deletion (KO): This figure shows a more detailed description of the mechanism described in FIG. 2A. sgRNAs targeting flanking region of interest can induce two DNA nicks using Cas9 D10A nickase in predefine locations containing the desired PAM sequences (shown as solid black box). Note. The PAMs can be located in opposite DNA strands as suppose to the example depicted in the figure where both PAMs are on the same DNA strand. Alternatively, sgRNAs can be used with Cas9 wild-type nuclease to induce two DSB flanking the region of interest. Addition of a donor oligo or a donor DNA fragment (single or double stranded) with homology to region 5′ of PAM 1 and 3′ of PAM 2 sequence will guide DNA repair in a precise manner via HDR. DNA repair via HDR will reduce the risk of indel formation at the breakpoint junctions and avoid DNA repair through NHEJ and in doing so, it will delete out the region flanked by the PAM sequence and carry out DNA repair in a pre-determined and pre-defined manner.

[0144] FIG. 3A: Precise DNA Deletion and Insertion (KO→KI): gRNAs targeting flanking region of interest can induce two DNA nicks using Cas9 D10A nickase in predefine locations containing the desired PAM sequences (shown as solid black box). Alternatively, gRNAs can be used with Cas9 wild-type nuclease to induce two DSB flanking the region of interest. Addition of a donor oligo or a donor DNA fragment (single or double stranded) with homology to region 5′ of PAM 1 and 3′ to PAM 2 with inclusion of additional endogenous or exogenous DNA, will guide DNA repair in a precise manner via HDR with the concomitant deletion of the region flanked by DSB or nick and the insertion of DNA of interest.

[0145] FIG. 3B: Precise DNA Deletion and Insertion (KO→KI): s This figure shows a more detailed description of the mechanism described in FIG. 3A. gRNAs targeting flanking region of interest can induce two DNA nicks using Cas9 D10A nickase in predefine locations containing the desired PAM sequences (shown as solid black box). Alternatively, sgRNAs can be used with Cas9 wild-type nuclease to induce two DSB flanking the region of interest. Addition of a donor oligo or a donor DNA fragment (single or double stranded) with homology to region 5′ of PAM 1 and 3′ to PAM 2 with inclusion of additional endogenous or exogenous DNA (DNA insert), will guide DNA repair in a precise manner via HDR with the concomitant deletion of the region flanked by DSB or nick and the insertion of DNA of interest. Note. Once again, the PAMs can be located in opposite DNA strands as suppose to the example depicted in the figure where both PAMs are on the same DNA strand

[0146] FIG. 4A: Recycling PAM For Sequential Genome Editing (Deletions): gRNAs targeting flanking region of interest can induce two DNA nicks using Cas9 D10A nickase in predefine locations containing the desired PAM sequences (shown as solid black box). Alternatively, gRNAs can be used with Cas9 wild-type nuclease to induce two DSB flanking the region of interest. Addition of a donor oligo or a donor DNA fragment (single or double stranded) with homology to region 5′ of PAM 2 and 3′ of PAM 3 will guide DNA repair in a precise manner via HDR and in doing so, it will delete out the region between PAM 2 and PAM3. This deletion will retain PAM 3 and thus acts as a site for carrying out another round of CRISPR/Cas mediated genome editing. Another PAM site (e.g., PAM 1) can be used in conjunction with PAM 3 sequence to carry out another round of deletion as described above. Using this PAM recycling approach, many rounds of deletions can be performed in a stepwise deletion fashion, where PAM 3 is recycled after each round. This approach can be used also for the stepwise addition of endogenous or exogenous DNA.

[0147] FIG. 4B: Recycling PAM For Sequential Genome Editing (Deletions): This figure shows a more detailed description of the mechanism described in FIG. 4B. sgRNAs targeting flanking region of interest can induce two DNA nicks using Cas9 D10A nickase in predefine locations containing the desired PAM sequences. Alternatively, sgRNAs can be used with Cas9 wild-type nuclease to induce two DSB flanking the region of interest. Addition of a donor oligo or a donor DNA fragment (single or double stranded) with homology to region 5′ of PAM 1 (clear PAM box) and 3′ of PAM 2 (black PAM box) will guide DNA repair in a precise manner via HDR and in doing so, it will delete out the region between PAM 1 and PAM 2. PAM sequence together with unique gRNA can be included in the intruding DNA and targeted back into the site of editing. In this, PAM 1 sequence for example can be recycled and thus acts as a site for carrying out another round of CRISPR/Cas mediated genome editing. Another PAM site (eg. PAM 3, grey PAM box) can be used in conjunction with the recycled PAM 1 sequence to carry out another round of editing (i.e. Insertion) as described above. Using this PAM recycling approach, many rounds of genome editing can be performed in a stepwise fashion, where PAM 1 is recycled after each round. This approach can be used also for the stepwise addition of endogenous or exogenous DNA.

[0148] FIG. 5A: CRISPR/Cas mediated Lox Insertion to facilitate RMCE: gRNAs targeting flanking region of interest can induce two DNA nicks using Cas9 D10A nickase in predefine locations containing the desired PAM sequences (shown as solid black box). Alternatively, gRNAs can be used with Cas9 wild-type nuclease to induce two DSB flanking the region of interest. Addition of two donor oligos or donor DNA fragments (single or double stranded) with homology to regions 5′ and 3′ of each PAM sequence where the donor DNA contains recombinase recognition sequence (RRS) such as loxP and lox5171 will guide DNA repair in a precise manner via HDR with the inclusion of these RRS. The introduced RRS can be used as a landing pad for inserting any DNA of interest with high efficiency and precisely using recombinase mediated cassette exchange (RMCE). The retained PAM 2 site can be recycled for another round of CRISPR/Cas mediated genome editing for deleting or inserting DNA of interest. Note, the inserted DNA of interest could contain selection marker such as PGK-Puro flanked by PiggyBac LTR to allow for the initial selection and upon successful integration into DNA of interest, the selection marker can be removed conveniently by expressing hyperPbase transposase.

[0149] FIG. 5B: CRISPR/Cas mediated Lox Insertion to facilitate RMCE: This figure shows a more detailed description of the mechanism described in FIG. 5A. sgRNAs targeting flanking region of interest can induce two DNA nicks using Cas9 D10A nickase in predefine locations containing the desired PAM sequences (shown as solid black box). Alternatively, sgRNAs can be used with Cas9 wild-type nuclease to induce two DSB flanking the region of interest. Addition of two donor oligos or donor DNA fragments (single or double stranded) with homology to regions 5′ and 3′ of each PAM sequences where the donor DNA contains recombinase recognition sequence (RRS) such as loxP and lox5171 will guide DNA repair in a precise manner via HDR with the inclusion of these RRS. Note. The targeting of the lox sites can be done sequentially or as a pool in a single step process. The introduced RRS can be used as a landing pad for inserting any DNA of interest with high efficiency and precisely using recombinase mediated cassette exchange (RMCE). As detailed in FIG. 4, the PAM sequence can be recycled for another round of CRISPR/Cas mediated genome editing for deleting or inserting DNA of interest. As an option, the inserted DNA of interest could contain selection marker such as PGK-Puro flanked by PiggyBac LTR to allow for the initial selection and upon successful integration into DNA of interest, the selection marker can be removed conveniently by expressing hyperPbase transposase.

[0150] FIGS. 6A and 6B: Genome modification to produce transposon-excisable Cas9 and gRNA

[0151] FIG. 6C: Single copy Cas9 Expression: A landing pad initially can be targeted into any locus of choice in mouse ES cells or any other eukaryotic cell line. The landing pad will typically contain PiggyBac 5′ and 3′ LTR, selection marker such as neo for example floxed and a gene less promoter such as PGK in the general configuration shown. Targeting is done by homologous recombination and clones are selected on G418. The next step will involve RMCE to insert Cas9 linked via a T2A sequence to Puro-delta-tk with the option to insert single or multiple guide RNA using the unique restriction sites (RS). The orientation of the lox sites are positioned in a manner that only once the intruding DNA containing the Cas9 is inserted into the landing pad, the PGK promoter on the landing pad can activate the transcription and thus the expression of the puromycin and via the T2A transcribe and expression Cas9 production. Using this approach a single stable expression of Cas9 can be achieved. Following 4-6 days of selection on puromycin, the entire Cas9 and guide RNA floxed cassette can be excised using PiggyBac transposase (Pbase) and individual clones can be analysed for genome editing resulting from the introduced guide RNA. As an option, a stable bank cell line expressing Cas9 can be generated from which multiple engineered cell lines can be generated. To do this, only Cas9-T2A-Puro-delta-tk will be inserted and no gRNA at the stage of RMCE. This will produce a general single copy Cas9 expressing cell line where its genome can be edited by transfecting single or multiple gRNA.

[0152] FIG. 7: Schematic representing the gRNA position with respect to gene X, the structure of the targeting vector and the oligo pair used for genotyping the resulting targeted clones.

[0153] FIG. 8: A gel image showing the genotyping results following Cas9 nuclease mediated double stranded DNA break and the subsequent DNA targeting. The genotyping shows PCR product (880 bp) specific for the 5′targeted homology arm using oligo pair HAP341/HAP334. The left hand gels show genotyping data from 96 ES cell clones transfected with gRNA, human Cas9 nuclease and either a circular targeting vector (plate 1) or a linear targeting vector (Plate 2). The right hand side gels shows 96 ES cell clones transfected with gRNA and either a circular targeting vector (plate 3) or a linear targeting vector (Plate 4) but with no human Cas9 nuclease. The percentage of the clones correctly targeted is shown for each transfection.

[0154] FIG. 9: Schematic showing the position of the gRNAs on a gene to allow for a define deletion of the region in between the two gRNA. The oligo pair primer 1 and 2 was used to detect ES clones containing the specific 55 bp deletion.

[0155] FIG. 10: A 3% agarose gel containing PCR products amplified from 96 ES clones transfected with gRNA 1 and 2. Primers 1 and 2 was used to amplify around the two gRNA and any clones containing the define deletion can be seen as a smaller PCR product, which are highlighted by an asterix.

[0156] FIG. 11: PCR genotyping by amplifying the 5′ (top gel) and 3′ (bottom gel) targeted homology arms within the Rosa26 gene located on chromosome 6. Correctly targeted clones yielding PCR product for both 5′ and 3′ junctions are marked with an asterix.

[0157] FIG. 12: Genotyping for the correct insertion of the Cas9 DNA cassette by PCR amplifying the 5′ (top gel) and 3′ (bottom gel) arm of the inserted DNA cassette.

[0158] FIG. 13: PCR genotyping by amplifying the region around the guide RNA and assessing the PCR product for the presence of indels. Larger indels can be seen directly from the gel as they yielded PCR product shorter than the expected WT DNA suggesting significant deletion. For the positive control, genomic DNA from mouse AB2.1 was used to size the corresponding WT PCR product. The negative control was a no DNA water control.

[0159] FIG. 14: PCR amplification of the region flanking the guide RNA using DNA extracted from pups following zygote Cas9/guide mRNA injection for analysing indel formation. Lane 14 shows a gross deletion in that mouse and those lanes marked with an asterix indicate these mice contain smaller indels.

[0160] FIG. 15: Summary of the sequencing data from the 8 mice analysed and the details of the indels detected are shown. The number refers to the frequency of that particular indel identified in the clones analysed and the description of the indels are shown in brackets.

### DETAILED DESCRIPTION OF THE INVENTION

[0161] The inventors addressed the need for improved nucleic acid modification techniques. An example of a technique for nucleic acid modification is the application of the CRISPR/Cas system. This system has been shown thus far to be the most advanced genome editing system available due, inter alia, to its broad application, the relative speed at which genomes can be edited to create mutations and its ease of use. The inventors, however, believed that this technology can be advanced for even broader applications than are apparent from the state of the art.

[0162] The inventors realised that an important aspect to achieve this would be to find a way of improving the fidelity of nucleic acid modifications beyond that contemplated by the CRISPR/Cas methods known in the art.

[0163] Additionally, the inventors realised that only modest nucleic acid modifications had been reported to date. It would be desirable to effect relatively large predefined and precise DNA deletions or insertions using the CRISPR/Cas system.

[0164] The inventors have devised an approach for introducing one or more desired insertions and/or deletions of known sizes into one or more predefined locations in a nucleic acid (e.g., in a cell or organism genome). They developed techniques to do this either in a sequential fashion or by inserting a discrete DNA fragment of defined size into the genome precisely in a predefined location or carrying out a discrete deletion of a defined size at a precise location. The technique is based on the observation that DNA single-stranded breaks are preferentially repaired through the HDR pathway, and this reduces the chances of indels (e.g., produced by NHEJ) in the present invention and thus is more efficient than prior art techniques.

[0165] To this end, the invention provides:—

[0166] A method of nucleic acid recombination, the method comprising providing double stranded DNA (dsDNA) comprising first and second strands and

(a) using nucleic acid cleavage to create 5′ and 3′ cut ends in the first strand; and
(b) using homologous recombination to insert a nucleotide sequence between the ends, thereby producing a modified first strand; thereby producing DNA wherein the first strand has been modified by said recombination but the second strand has not been modified.

[0167] Optionally, the method further comprises replicating the modified first strand to produce a progeny dsDNA wherein each strand thereof comprises a copy of the insert nucleotide sequence. Optionally, the method comprises (c) isolating the progeny dsDNA, e.g., by obtaining a cell containing said progeny dsDNA. Replication can be effected, for example in a cell. For example, steps (a) and (b) are carried out in a cell and the cell is replicated, wherein the machinery of the cell replicates the modified first strand, e.g., to produce a dsDNA progeny in which each strand comprises the modification.

[0168] Optionally, in any configuration, aspect, example or embodiment of the invention, the modified DNA strand resulting from step (b) is isolated.

[0169] Optionally, in any configuration, aspect, example or embodiment of the invention, the method is carried out in vitro. For example, the method is carried out in a cell or cell population in vitro.

[0170] Alternatively, optionally, in any configuration, aspect, example or embodiment of the invention, the method is carried out to modify the genome of a virus.

[0171] Alternatively, optionally, in any configuration, aspect, example or embodiment of the invention, the method is carried out in vivo in an organism. In an example, the organism is a non-human organism. In an example, it is a plant or an animal or an insect or a bacterium or a yeast. For example, the method is practised on a vertebrate (e.g., a human patient or a non-human vertebrate (e.g., a bird, e.g., a chicken) or non-human mammal such as a mouse, a rat or a rabbit).

[0172] Optionally, in any configuration, aspect, example or embodiment of the invention, the method is a method of cosmetic treatment of a human or a non-therapeutic, non-surgical, non-diagnostic method, e.g., practised on a human or a non-human vertebrate or mammal (e.g., a mouse or a rat).

[0173] The invention also provides:—

[0174] A method of nucleic acid recombination, the method comprising

(a) using nucleic acid cleavage to create 5′ and 3′ cut ends in a single nucleic acid strand;
(b) using homologous recombination to insert a nucleotide sequence between the ends, wherein the insert sequence comprises a regulatory element or encodes all or part of a protein; and
(c) Optionally obtaining the nucleic acid strand modified in step (b) or a progeny nucleic strand comprising the inserted nucleotide sequence, e.g., by obtaining a cell containing said progeny nucleic acid strand.

[0175] In an example the progeny strand is a product of the replication of the strand produced by step (b). The progeny strand is, for example, produced by nucleic acid replication in a cell. For example, steps (a) and (b) are carried out in a cell and the cell is replicated, wherein the machinery of the cell replicates the modified strand produced in step (b), e.g., to produce a dsDNA progeny in which each strand comprises the modification.

[0176] In an example, the single nucleic acid strand is a DNA or RNA strand.

[0177] In an example, the regulatory element is a promoter or enhancer.

[0178] Optionally, in any configuration, aspect, example or embodiment of the invention, the inserted nucleotide sequence is a plant, animal, vertebrate or mammalian sequence. e.g., a human sequence. For example, the sequence encodes a complete protein, polypeptide, peptide, domain or a plurality (e.g. one, two or more) of any one of these. In an example, the inserted sequence confers a resistance property to a cell comprising the modified nucleic acid produced by the method of the invention (e.g., herbicide, viral or bacterial resistance). In an example, the inserted sequence encodes an interleukin, receptor (e.g., a cell surface receptor), growth factor, hormone, antibody (or variable domain or binding site thereof), antagonist, agonist; e.g., a human version of any of these. In an example, the inserted sequence is an exon.

[0179] Optionally, in any configuration, aspect, example or embodiment of the invention, the inserted nucleotide sequence replaces an orthologous or homologous sequence of the strand (e.g., the insert is a human sequence that replaces a plant, human or mouse sequence). For example, the method is carried out in a mouse or mouse cell (such as an ES cell) and the insert replaces an orthologous or homologous mouse sequence (e.g., a mouse biological target protein implicated in disease). For example, the method is carried out (e.g., in vitro) in a human cell and the insert replaces an orthologous or homologous human sequence (e.g., a human biological target protein implicated in disease, e.g., a mutated form of a sequence is replaced with a different (e.g., wild-type) human sequence, which may be useful for correcting a gene defect in the cell. In this embodiment, the cell may be a human ES or iPS or totipotent or pluripotent stem cell and may be subsequently introduced into a human patient in a method of gene therapy to treat and/or prevent a medical disease or condition in the patient).

[0180] Optionally, in any configuration, aspect, example or embodiment of the invention, the inserted nucleotide sequence is at least 10 nucleotides long, e.g., at least 20, 30, 40, 50, 60, 70, 80, 90, 100, 150, 200, 300, 400, 500, 600, 700, 800 or 900 nucleotides, or at least 1, 2, 3, 5, 10, 20, 50 or 100 kb long.

[0181] Optionally, in any configuration, aspect, example or embodiment of the invention, the insert sequence comprises a site specific recombination site, e.g., a lox, frt or rox site. For example, the site can be a loxP, lox511 or lox2272 site.

[0182] The invention also provides:—

[0183] A method of nucleic acid recombination, the method comprising

(a) using nucleic acid cleavage to create first and second breaks in a nucleic acid strand, thereby creating 5′ and 3′ cut ends and a nucleotide sequence between the ends;
(b) using homologous recombination to delete the nucleotide sequence; and
(c) optionally obtaining the nucleic acid strand modified in step (b) or a progeny nucleic strand comprising the deletion.

[0184] In an example, the progeny strand is a product of the replication of the strand produced by step (b). The progeny strand is, for example, produced by nucleic acid replication in a cell. For example, steps (a) and (b) are carried out in a cell and the cell is replicated, wherein the machinery of the cell replicates the modified strand produced in step (b), e.g., to produce a dsDNA progeny in which each strand comprises the modification.

[0185] In an example, the single nucleic acid strand is a DNA or RNA strand.

[0186] In an example, the deleted sequence comprises a regulatory element or encodes all or part of a protein. In an embodiment, the deleted regulatory element is a promoter or enhancer.

[0187] Optionally, in any configuration, aspect, example or embodiment of the invention, the deleted nucleotide sequence is a plant, animal, vertebrate or mammalian sequence, e.g., a human sequence. For example, the sequence encodes a complete protein, polypeptide, peptide, domain or a plurality (e.g. one, two or more) of any one of these. In an example, the deleted sequence encodes an interleukin, receptor (e.g., a cell surface receptor), growth factor, hormone, antibody (or variable domain or binding site thereof), antagonist, agonist; e.g., a non-human version of any of these. In an example, the deleted sequence is an exon.

[0188] Optionally, in any configuration, aspect, example or embodiment of the invention, the deleted nucleotide sequence is replaced by an orthologous or homologous sequence of a different species or strain (e.g., a human sequence replaces an orthologous or homologous plant, human or mouse sequence). For example, the method is carried out in a mouse or mouse cell and the insert replaces an orthologous or homologous mouse sequence (e.g., a mouse biological target protein implicated in disease). For example, the method is carried out (e.g., in vitro) in a human cell and the insert replaces an orthologous or homologous human sequence (e.g., a human biological target protein implicated in disease, e.g., a mutated form of a sequence is replaced with a different (e.g., wild-type) human sequence, which may be useful for correcting a gene defect in the cell. In this embodiment, the cell may be a human ES or iPS or totipotent or pluripotent stem cell and may be subsequently introduced into a human patient in a method of gene therapy to treat and/or prevent a medical disease or condition in the patient).

[0189] Optionally, in any configuration, aspect, example or embodiment of the invention, the deleted nucleotide sequence is at least 10 nucleotides long, e.g., at least 20, 30, 40, 50, 60, 70, 80, 90, 100, 150, 200, 300, 400, 500, 600, 700, 800 or 900 nucleotides, or at least 1, 2, 3, 5, 10, 20, 50 or 100 kb long.

[0190] Optionally, in any configuration, aspect, example or embodiment of the invention, step (c) is performed by isolating a cell comprising the modified first strand, or by obtaining a non-human vertebrate in which the method has been performed or a progeny thereof.

[0191] Optionally, in any configuration, aspect, example or embodiment of the invention, the product of the method comprises a nucleic acid strand comprising a PAM motif 3′ of the insertion or deletion. In an example, the PAM motif is within 10, 9, 8, 7 6, 5, 4 or 3 nucleotides of the insertion or deletion. This is useful to enable serial insertions and/or deletions according to the method as explained further below.

[0192] Optionally, in any configuration, aspect, example or embodiment of the invention, the product of the method comprises a nucleic acid strand comprising a PAM motif 5′ of the insertion or deletion. In an example, the PAM motif is within 10, 9, 8, 7 6, 5, 4 or 3 nucleotides of the insertion or deletion. This is useful to enable serial insertions and/or deletions according to the method as explained further below.

[0193] Optionally, in any configuration, aspect, example or embodiment of the invention, step (b) is performed by carrying out homologous recombination between an incoming nucleic acid comprising first and second homology arms, wherein the homology arms are substantially homologous respectively to a sequence extending 5′ from the 5′ end and a sequence extending 3′ from the 3′ end. The skilled person will be familiar with constructing vectors and DNA molecules for use in homologous recombination, including considerations such as homology arm size and sequence and the inclusion of selection markers between the arms. For example, the incoming nucleic acid comprises first and second homology arms, and the insert sequence and an optional selection marker sequence (e.g., neo nucleotide sequence). The arms may be at least 20, 30, 40, 50, 100 or 150 nucleotides in length, for example. Where deletion is required, the insert is omitted (although an optional selection marker sequence may or may not be included between the arms).

[0194] Thus, in an embodiment of the invention, step (b) is performed by carrying out homologous recombination between an incoming nucleic acid comprising an insert nucleotide sequence flanked by the first and second homology arms, wherein the insert nucleotide sequence is inserted between the 5′ and 3′ ends.

[0195] In another embodiment of the invention, the insert is between the homology arms and there is no further sequence between the arms.

[0196] In an example, each homology arm is at least 20, 30, 40, 50, 100 or 150 nucleotides long.

[0197] Optionally, in any configuration, aspect, example or embodiment of the invention, step (a) is carried out using an endonuclease, e.g., a nickase. Nickases cut in a single strand of dsDNA only. For example, the endonuclease is an endonuclease of a CRISPR/Cas system, e.g., a Cas9 or Cys4 endonuclease (e.g., a Cas9 or Cys4 nickase). In an example, the endonuclease recognises a PAM listed in Table 1 below, for example, the endonuclease is a Cas endonuclease that recognises a PAM selected from CCN, TCN, TTC, AWG, CC, NNAGNN, NGGNG GG, NGG, WGG, CWT, CTT and GAA. In an example, the Cas endonuclease is a Spyogenes endonuclease, e.g., a Spyogenes Cas9 endonuclease. In an example, a S pyogenes PAM sequence or Streptococcus thermophilus LMD-9 PAM sequence is used.

[0198] In an example, the endonuclease is a Group 1 Cas endonuclease. In an example, the endonuclease is a Group 2 Cas endonuclease. In an example, the endonuclease is a Group 3 Cas endonuclease. In an example, the endonuclease is a Group 4 Cas endonuclease. In an example, the endonuclease is a Group 7 Cas endonuclease. In an example, the endonuclease is a Group 10 Cas endonuclease.

[0199] In an example, the endonuclease recognises a CRISPR/Cas Group 1 PAM. In an example, the endonuclease recognises a CRISPR/Cas Group 2 PAM. In an example, the endonuclease recognises a CRISPR/Cas Group 3 PAM. In an example, the endonuclease recognises a CRISPR/Cas Group 4 PAM. In an example, the endonuclease recognises a CRISPR/Cas Group 7 PAM. In an example, the endonuclease recognises a CRISPR/Cas Group 10 PAM.

[0200] In an example, Cas endonuclease-mediated cleavage is used in step (a); optionally by recognition of a GG or NGG PAM motif.

[0201] In an example, the first and/or second homology arm comprises a PAM motif. This is useful to enable serial insertions and/or deletions according to the method as explained further below.

[0202] An example of a suitable nickase is Spyogenes Cas9 D10A nickase (see Cong et al. and the Examples section below).

[0203] Optionally, in any configuration, aspect example or embodiment of the invention, steps (a) and (b) of the method is carried out in a cell, e.g. a bacterial, yeast, eukaryotic cell, plant, animal, mammal, vertebrate, non-human animal, rodent, rat, mouse, rabbit, fish, bird or chicken cell. For example, the cell is an E coli cell or CHO or HEK293 or Picchia or Saccharomyces cell. In an example, the cell is a human cell in vitro. In one embodiment, the cell is an embryonic stem cell (ES cell, e.g., a human or non-human ES cell, such as a mouse ES cell) or an induced pluripotent stem cell (iPS cell; e.g., a human, rodent, rat or mouse iPS cell) or a pluripotent or totipotent cell. Optionally, the cell is not an embryonic cell, e.g. wherein the cell is not a human embryonic cell. Optionally, the cell is not a pluripotent or totipotent cell. In an example, the method is used to produce a human stem cell for human therapy (e.g., an iPS cell generated from a cell of a patient for reintroduction into the patient after the method of the invention has been performed on the cell), wherein the stem cell comprises a nucleotide sequence or gene sequence inserted by the method of the invention. The features of the examples in this paragraph can be combined.

[0204] In an example, the method is carried out in a mammalian cell. For example, the cell is a human cell in vitro or a non-human mammalian cell. For example, a non-human (e.g., rodent, rat or mouse) zygote. For example, a single-cell non-human zygote.

[0205] In an example, the method is carried out in a plant or non-human mammal, e.g. a rodent, mouse or rat or rabbit, or a tissue or organ thereof (e.g., in vitro).

[0206] In an example, the 3′ or each cleavage site is flanked 3′ by PAM motif (e.g., a motif disclosed herein, such as NGG or NGGNG sequence, wherein N is any base and G is a guanine). For example, one or more or all cleavage sites are flanked 3′ by the sequence 5′-TGGTG-3′. Unlike dsDNA, the PAM is not absolutely required for ssDNA binding and cleavage: A single-stranded oligodeoxynucleotide containing a protospacer with or without a PAM sequence is bound nearly as well as dsDNA and may be used in the invention wherein a single strand of DNA is modified. Moreover, in the presence of Mg^{2′} ions, Cas9 cuts ssDNA bound to the crRNA using its HNH active site independently of PAM.

[0207] Optionally, in any configuration, aspect, example or embodiment of the invention, step (a) is carried out by cleavage in one single strand of dsDNA or in ssDNA.

[0208] Optionally, in any configuration, aspect, example or embodiment of the invention, step (a) is carried out by combining in a cell the nucleic acid strand, a Cas endonuclease, a crRNA and a tracrRNA (e.g., provided by one or more gRNAs) for targeting the endonuclease to carry out the cleavage, and optionally an insert sequence for homologous recombination with the nucleic acid strand. Instead of an insert sequence, one can use an incoming sequence containing homology arms but no insert sequence, to effect deletion as described above. In an example, the Cas endonuclease is encoded by a nucleotide sequence that has been introduced into the cell. In an example, the gRNA is encoded by a DNA sequence that has been introduced into the cell.

[0209] In an example, the method is carried out in the presence of Mg²⁺.

[0210] Optionally, in any configuration, aspect, example or embodiment of the invention, step (b) is performed by carrying out homologous recombination with an incoming nucleic acid comprising first and second homology arms, wherein the homology arms are substantially homologous respectively to a sequence extending 5′ from the 5′ end and a sequence extending 3′ from the 3′ end, wherein the second homology arm comprises a PAM sequence such that homologous recombination between the second homology arm and the sequence extending 3′ from the 3′ end produces a sequence comprising a PAM motif in the product of the method. The PAM can be any PAM sequence disclosed herein, for example. Thus, the method produces a modified nucleic acid strand comprising a PAM that can be used for a subsequent nucleic acid modification according to any configuration, aspect, example or embodiment of the invention, wherein a Cas endonuclease is used to cut the nucleic acid. This is useful, for example, for performing sequential endonuclease-mediated homology directed recombination (sEHDR) according to the invention, more particularly sCHDR described below.

Sequential Endonuclease-Mediated Homology Directed Recombination (sEHDR)
The invention further provides:—

[0211] A method of sequential endonuclease-mediated homology directed recombination (sEHDR) comprising carrying out the method of any preceding configuration, aspect, example or embodiment of the invention a first time and a second time, wherein endonuclease-mediated cleavage is used in each step (a); wherein the product of the first time is used for endonuclease-mediated cleavage the second time, whereby either (i) first and second nucleotide sequences are deleted the first time and the second times respectively; (ii) a first nucleotide sequence is deleted the first time and a second nucleotide sequence is inserted the second time; (iii) a first nucleotide sequence is inserted the first time and a second nucleotide sequence is deleted the second time; or (iv) first and second nucleotide sequences are inserted the first and second times respectively; optionally wherein the nucleic acid strand modification the second time is within 20, 10, 5, 4, 3, 2 or 1 or less nucleotides of the nucleic acid strand modification the first time or directly adjacent to the nucleic acid strand modification the first time.

[0212] For example, the first and second nucleotide sequences are inserted so that they are contiguous after the insertion the second time. Alternatively, the first and second deletions are such that a contiguous sequence has been deleted after the first and second deletions have been performed.

[0213] In an embodiment of sEHDR, the invention uses a Cas endonuclease. Thus, there is provided:—

[0214] A method of sequential Cas-mediated homology directed recombination (sCHDR) comprising carrying out the method of any preceding claim a first time and a second time, wherein Cas endonuclease-mediated cleavage is used in each step (a); wherein step (b) of the first time is carried out performing homologous recombination with an incoming nucleic acid comprising first and second homology arms, wherein the homology arms are substantially homologous respectively to a sequence extending 5′ from the 5′ end and a sequence extending 3′ from the 3′ end, wherein the second homology arm comprises a PAM sequence such that homologous recombination between the second homology arm and the sequence extending 3′ from the 3′ end produces a sequence comprising a PAM motif in the product of the method; wherein the PAM motif of the product of the first time is used for Cas endonuclease-mediated cleavage the second time, whereby either (i) first and second nucleotide sequences are deleted the first time and the second times respectively (ii) a first nucleotide sequence is deleted the first time and a second nucleotide sequence is inserted the second time; (iii) a first nucleotide sequence is inserted the first time and a second nucleotide sequence is deleted the second time; or (iv) first and second nucleotide sequences are inserted the first and second times respectively; optionally wherein the nucleic acid strand modification the second time is within 20, 10, 5, 4, 3, 2 or 1 or less nucleotides of the nucleic acid strand modification the first time or directly adjacent to the nucleic acid strand modification the first time.

[0215] For example, the first and second nucleotide sequences are inserted so that they are contiguous after the insertion the second time. Alternatively, the first and second deletions are such that a contiguous sequence has been deleted after the first and second deletions have been performed.

[0216] In an embodiment (First Embodiment), the first time is carried out according to the third configuration of the invention, wherein the incoming nucleic acid comprises no sequence between the first and second homology arms, wherein sequence between the 5′ and 3′ ends is deleted by homologous recombination; and/or the second time is carried out according to the third configuration of the invention, wherein step (b) is performed by carrying out homologous recombination between an incoming nucleic acid comprising first and second homology arms, wherein the homology arms are substantially homologous respectively to a sequence extending 5′ from the 5′ end and a sequence extending 3′ from the 3′ end, wherein the incoming nucleic acid comprises no sequence between the first and second homology arms such that sequence between the 5′ and 3′ ends is deleted by homologous recombination; optionally wherein the second arm comprises a PAM motif such that the product of the second time comprises a PAM motif for use in a subsequent Cas endonuclease-mediated method according to any configuration, aspect, example or embodiment of the invention.

[0217] In an embodiment (Second Embodiment), the first time is carried out according to the first or second configuration of the invention, wherein the incoming nucleic acid comprises the insert sequence between the first and second homology arms, wherein the insert sequence is inserted between the 5′ and 3′ ends by homologous recombination; and/or the second time is carried out according to the first or second configuration of the invention, wherein step (b) is performed by carrying out homologous recombination between an incoming nucleic acid comprising first and second homology arms, wherein the homology arms are substantially homologous respectively to a sequence extending 5′ from the 5′ end and a sequence extending 3′ from the 3′ end, wherein the insert sequence is inserted between the 5′ and 3′ ends by homologous recombination; optionally wherein the second arm comprises a PAM motif such that the product of the second time comprises a PAM motif for use in a subsequent Cas endonuclease-mediated method according to any configuration, aspect, example or embodiment of the invention.

[0218] In an example, one of said first and second times is carried out as specified in the First Embodiment and the other time is carried out as specified in the Second Embodiment, wherein at least one sequence deletion and at least one sequence insertion is performed.

[0219] Optionally, in any configuration, aspect, example or embodiment of the invention, step (a) is carried out by Cas endonuclease-mediated cleavage using a Cas endonuclease, one or more crRNAs and a tracrRNA. For example, the method is carried out in a cell and the crRNA and tracrRNA is introduced into the cell as RNA molecules. For example, the method is carried out in a zygote (e.g., a non-human zygote, e.g., a rodent, rat or mouse zygote) and the crRNA and tracrRNA is injected into zygote. In another embodiment, the crRNA and tracrRNA are encoded by DNA within a cell or organism and are transcribed inside the cell (e.g., an ES cell, e.g., a non-human ES cell, e.g., a rodent, rat or mouse ES cell) or organism to produce the crRNA and tracrRNA. The organism is, for example, a non-human animal or plant or bacterium or yeast or insect. In an embodiment, the tracrRNA is in this way encoded by DNA but one or more crRNAs are introduced as RNA nucleic acid into the cell or organism to effect the method of the invention.

[0220] Additionally or alternatively to these examples, the endonuclease may be introduced as a protein or a vector encoding the endonuclease may be introduced into the cell or organism to effect the method of the invention. In another example, the endonuclease is encoded by DNA that is genomically integrated into the cell or organism and is transcribed and translated inside the cell or organism.

[0221] In an example, the method of the invention is carried out in an ES cell (e.g., a non-human ES cell, e.g., a rodent, rat or mouse ES cell) that has been pre-engineered to comprise an expressible genomically-integrated Cas endonuclease sequence (or a vector carrying this has been include in the cell). It would be possible to introduce (or encode) a tracrRNA. By introducing a crRNA with a guiding oligo sequence to target the desired area of the cell genome, one can then carry out modifications in the cell genome as per the invention. In an example, a gRNA as described herein is introduced into the ES cell. The genomically-integrated expressible Cas endonuclease sequence can, for example, be constitutively expressed or inducibly expressible. Alternatively or additionally, the sequence may be expressible in a tissue-specific manner in a progeny organism (e.g., a rodent) developed using the ES cell.

[0222] The initial ES cell comprising a genomically-integrated expressible Cas endonuclease sequence can be used, via standard techniques, to produce a progeny non-human animal that contains the expressible Cas endonuclease sequence. Thus, the invention provides:—

[0223] A non-human animal (e.g., a vertebrate, mammal, fish or bird), animal cell, insect, insect cell, plant or plant cell comprising a genomically-integrated expressible Cas endonuclease nucleotide sequence and optionally a tracrRNA and/or a nucleotide sequence encoding a tracrRNA. The Cas endonuclease is, for example. Cas9 or Cys4. In an example, the animal, insect or plant genome comprises a chromosomal DNA sequence flanked by site-specific recombination sites and/or transposon elements (e.g., piggyBac transposon repeat elements), wherein the sequence encodes the endonuclease and optionally one or more gRNAs. As described in the Examples below, recombinase-mediated cassette exchange (RMCE) can be used to insert such a sequence. The transposon elements can be used to excise the sequence from the genome once the endonuclease has been used to perform recombination. The RMCE and/or transposon-mediated excision can be performed in a cell (e.g., an ES cell) that later is used to derive a progeny animal or plant comprising the desired genomic modification.

[0224] The invention also provides an ES cell derived or derivable from such an animal, wherein the ES cell comprises a genomically-integrated expressible Cas endonuclease nucleotide sequence. In an example, the ES cell is a rodent, e.g., a mouse or rat ES cell, or is a rabbit, dog, pig, cat, cow, non-human primate, fish, amphibian or bird ES cell.

[0225] The invention also provides a method of isolating an ES cell, the method comprising deriving an ES cell from an animal (e.g., a non-human animal, e.g., a rodent, e.g., a rat or a mouse), wherein the animal comprises a genomically-integrated expressible Cas endonuclease nucleotide sequence, as described herein.

[0226] In any of these aspects, instead of an ES cell, the cell may be an iPS cell or a totipotent or pluripotent cell. Thus, an iPS or stem cell can be derived from (e.g., a somatic cell of) a human, engineered in vitro to comprise a genomically-integrated expressible Cas endonuclease nucleotide sequence and optionally one or more DNA sequences encoding a tracrRNA or gRNA. The invention, thus, also relates to such a method and to a human iPS or stem cell comprising a genomically-integrated expressible Cas endonuclease nucleotide sequence and optionally one or more DNA sequences encoding a tracrRNA or gRNA. This cell can be used in a method of the invention to carry out genome modification (e.g., to correct a genetic defect, e.g., by replacement of defective sequence with a desired sequence, optionally with subsequent transposon-mediated excision of the endonuclease-encoding sequence). After optional excision of the Cas endonuclease sequence, the iPS cell or stem cell can be introduced into the donor human (or a different human, e.g., a genetic relative thereof) to carry out genetic therapy or prophylaxis. In the alternative, a totipotent or pluripotent human cell is used and then subsequently developed into human tissue or an organ or part thereof. This is useful for providing material for human therapy or prophylaxis or for producing assay materials (e.g., for implantation into model non-human animals) or for use in in vitro testing (e.g., of drugs).

[0227] In an example, the method uses a single guided RNA (gRNA or sgRNA) comprising a crRNA and a tracrRNA. The crRNA comprises an oligonucleotide sequence (“X” in the structure 5′-X-Y-3′ mentioned below) that is chosen to target a desired part of the nucleic acid or genome to be modified. The skilled person will be able readily to select appropriate oligo sequence(s). In an example, the sequence is from 3 to 100 nucleotides long, e.g., from 3 to 50, 40, 30, 25, 20, 15 or 10 nucleotides long, e.g., from or 5, 10, 15 or 20 to 100 nucleotides long, e.g., from 5, 10, 15 or 20 to 50 nucleotides long.

[0228] For example, the gRNA is a single nucleic acid comprising both the crRNA and the tracrRNA. An example of a gRNA comprises the sequence 5′-[oligo]-[UUUUAGAGCUA (S NIUUUUAN2N3GCUA)]-[LINKER]-[UAGCAAGUUAAAA (SEQ ID NO:2)]-3′, wherein the LINKER comprises a plurality (e.g., 4 or more, e.g., 4, 5 or 6) nucleotides (e.g., 5′-GAAA-3′).

[0229] For example, the crRNA has the structure 5′-X-Y-3′, wherein X is an RNA nucleotide sequence (optionally, at least 5 nucleotides long) and Y is a crRNA sequence comprising a nucleotide motif that hybridises with a motif comprised by the tracrRNA, wherein X is capable of hybridising with a nucleotide sequence 5′ of the desired site of the 5′ cut end, e.g., extending 5′ from the desired site of the 5′ cut.

[0230] In an example, Y is 5′-NIUUUUAN2N3GCUA-3′ (SEQ ID NO:3), wherein each of N1-3 is a A, U, C or G and/or the tracrRNA comprises the sequence (in 5′ to 3′ orientation) UAGCM1UUAAAAM2 (SEQ ID NO:4), wherein M1 is spacer nucleotide sequence and M2 is a nucleotide; e.g., N1-G, N2=G and N3=A. The spacer sequence is, e.g., 5, 4, 3, 2 or 1 RNA nucleotides in length (e.g., AAG in 5′ to 3′ orientation). M2 is, for example, an A, U, C or G (e.g., M2 is a G). In an embodiment, a chimaeric gRNA is used which comprises a sequence 5′-X—Y-Z-3′, wherein X and Y are as defined above and Z is a tracrRNA comprising the sequence (in 5′ to 3′ orientation) UAGCM1UUAAAAM2 (SEQ ID NO:4), wherein M1 is spacer nucleotide sequence and M2 is a nucleotide. In an example, Z comprises the sequence 5′-UAGCAAGUUAAAA-3′ (SEQ ID NO:2), e.g., Z is 5′-UAGCAAGUUAAAAUAAGGCUAGUCCG-3′ (SEQ ID NO:5). In an example, the gRNA has the sequence:

(SEQ ID NO: 6)
5′-GUUUUAGAGCUAGAAAUAGCAAGUUAAAAUAAGGCUAGUCCGUUAU
CAACUUGAAAAAGUGGCACCGAGUCGGUGC-3′

[0231] When it is desired to use the present invention to insert an exogenous sequence into the nucleic acid to be modified, the exogenous sequence can be provided on linear or circular nucleic acid (e.g., DNA). Typically, the exogenous sequence is flanked by homology arms that can undergo homologous recombination with sequences 5′ and 3′ respectively of the site where the exogenous sequence is to be inserted. The skilled person is familiar with choosing homology arms for homologous recombination.

[0232] The invention can be used in a method of producing a transgenic organism, e.g., any organism recited herein. For example, the organism can be a non-human organism used as an assay model to test a pharmaceutical drug or to express an exogenous protein or a part thereof (e.g., a human protein target knocked-in into a non-human animal assay organism). In another example, the invention has been used to knock-out an endogenous sequence (e.g., a target protein) in an organism, such as a non-human organism. This can be useful to assess the effect (phenotype) of the knock-out and thus to assess potential drug targets or proteins implicated in disease. In one example, the organism is a non-human animal (e.g., a vertebrate, mammal, bird, fish, rodent, mouse, rat or rabbit) in which a human target protein has been knocked-in using the invention. Optionally, the invention has been used to knock out an orthologous or homologous endogenous target of the organism (e.g., an endogenous target sequence has been replaced at the endogenous position by an orthologous or homologous human target sequence). In this way, an assay model can be produced for testing pharmaceutical drugs that act via the human target.

[0233] In an embodiment, the organism is a non-human vertebrate that expresses human antibody variable regions whose genome comprises a replacement of an endogenous target with an orthologous or homologous human sequence. In an example, the method of the invention is used to produce an Antibody-Generating Vertebrate or Assay Vertebrate as disclosed in WO2013061078, the disclosure of which, and specifically including the disclosure of such Vertebrates, their composition, manufacture and use, is included specifically herein by reference as though herein reproduced in its entirety and for providing basis for claims herein.

[0234] In an example, an exogenous regulatory element is knocked-in using the method. For example, it is knocked-in to replace an endogenous regulatory element.

[0235] In one aspect, the invention provides a method of producing a cell or a transgenic non-human organism (e.g., any non-human organism recited herein), the method comprising:

(a) carrying out the method of any in any configuration, aspect, example or embodiment of the invention to (i) knock out a target nucleotide sequence in the genome of a first cell and/or (ii) knock in an insert nucleotide sequence into the genome of a first cell, optionally wherein the insert sequence replaces a target sequence in whole or in part at the endogenous location of the target sequence in the genome; wherein the cell or a progeny thereof can develop into a non-human organism or cell; and

[0236] (b) developing the cell or progeny into a non-human organism or a non-human cell.

[0237] In an example, the organism or cell is homozygous for the modification (i) and/or (ii).

[0238] In an example, the cell is an ES cell (such as a mouse ES cell), iPS cell, totipotent cell or pluripotent cell. In an example, the cell is a non-human vertebrate cell or a human cell in vitro. In an example, the cell is a plant, yeast, insect or bacterial cell.

[0239] In an example, the cell or organism is a rodent (e.g., a mouse or rat) cell or a rabbit, bird, fish, chicken, non-human primate, monkey, pig, dog, Camelid, shark, sheep, cow or cat cell.

[0240] In an example, the target sequence is an endogenous sequence comprising all or part of a regulatory element or encoding all or part of a protein.

[0241] In an example, the insert sequence is a synthetic sequence; or comprises a sequence encoding all or part of a protein from a species other than the species from which the first cell is derived; or comprises a regulatory element from said first species. This is useful to combine genes with new regulatory elements.

[0242] In an example, the insert sequence encodes all or part of a human protein or a human protein subunit or domain. For example, the insert sequence encodes a cell membrane protein, secreted protein, intracellular protein, cytokine, receptor protein (e.g., Fc receptor protein, such as FcRn or a Fcγ receptor protein), protein of the human immune system or domain thereof (e.g., an Ig protein or domain, such as an antibody or TCR protein or domain, or a MHC protein), a hormone or growth factor.

[0243] The invention also provides:—

[0244] A cell (e.g., an isolated or purified cell, e.g., a cell in vitro, or any cell disclosed herein) or a non-human organism (e.g., any organism disclosed herein, such as a mouse) whose genome comprises a modification comprising a non-endogenous nucleotide sequence flanked by endogenous nucleotide sequences, wherein the cell or organism is obtainable by the method of any configuration, aspect, example or embodiment of the invention, and wherein the non-endogenous sequence is flanked 3′ and/or 5′ by (e.g., within 20, 10, 5, 4, 3, 2 or 1 or less nucleotides of, or directly adjacent to) a Cas PAM motif; wherein the cell is not comprised by a human; and one, more or all of (a) to (d) applies (for example, (a); (b); (c); (d); (a) and (b); (a) and (c); (a) and (d); (b) and (c); (b) and (d); (c) and (d); (a), (b) and (c); (a), (b) and (d); (a), (c) and (d); (b), (c) and (d) or all of (a), (b), (c) and (d)).
[0245] (a) the genome is homozygous for the modification; or comprises the modification at one allele and is unmodified by Cas-mediated homologous recombination at the other allele;
[0246] (b) the non-endogenous sequence comprises all or part of a regulatory element or encodes all or part of a protein:
[0247] (c) the non-endogenous sequence is at least 20, 30, 40, 50, 60, 70, 80, 90, 100, 150, 200, 300, 400, 500, 600, 700, 800 or 900 nucleotides, or at least 1, 2, 3, 5, 10, 20, 50 or 100 kb long:
[0248] (d) the non-endogenous sequence replaces an orthologous or homologous sequence in the genome.

[0249] The cell can be a human cell, or included in human tissue but not part of a human being. For example, the cell is a human cell in vitro.

[0250] In an example, the non-endogenous sequence is a human sequence.

[0251] In an example, the PAM motif is any PAM disclosed herein or comprises a sequence selected from CCN, TCN, TTC, AWG, CC, NNAGNN, NGGNG GG, NGG, WGG, CWT, CTT and GAA. For example, the motif is a Cas9 PAM motif. For example, the PAM is NGG. In another example, the PAM is GG.

[0252] In an example, there is a PAM motif no more than 10 nucleotides (e.g., 3 nucleotides) 3′ and/or 5′ of the non-endogenous sequence.

[0253] In an example, the PAM motif is recognised by a Streptococcus Cas9.

[0254] In an example, the cell or organism is a non-human vertebrate cell or a non-human vertebrate that expresses one or more human antibody heavy chain variable domains (and optionally no heavy chain variable domains of a non-human vertebrate species). For example, the organism is an Antibody-Generating Vertebrate or Assay Vertebrate disclosed in WO2013061078.

[0255] In an example, the cell or organism is a non-human vertebrate cell or a non-human vertebrate that expresses one or more human antibody kappa light chain variable domains (and optionally no kappa light chain variable domains of a non-human vertebrate species).

[0256] In an example, the cell or organism is a non-human vertebrate cell or a non-human vertebrate that expresses one or more human antibody lambda light chain variable domains (and optionally no kappa light chain variable domains of a non-human vertebrate species).

[0257] In an example, the non-endogenous sequence encodes a human Fc receptor protein or subunit or domain thereof (e.g., a human FcRn or Fcγ receptor protein, subunit or domain).

[0258] In an example, the non-endogenous sequence comprises one or more human antibody gene segments, an antibody variable region or an antibody constant region.

[0259] In an example, the insert sequence is a human sequence that replaces or supplements an orthologous non-human sequence.

[0260] The invention also provides:—

A monoclonal or polyclonal antibody prepared by immunisation of a vertebrate (e.g., mouse or rat) of the invention (or produced by a method of the invention) with an antigen.

[0261] The invention also provides:—

A method of isolating an antibody that binds a predetermined antigen, the method comprising:
[0262] (a) providing a vertebrate (optionally a mouse or rat) of the invention (or produced by a method of the invention);
[0263] (b) immunising said vertebrate with said antigen;
[0264] (c) removing B lymphocytes from the vertebrate and selecting one or more B lymphocytes expressing antibodies that bind to the antigen:
[0265] (d) optionally immortalising said selected B lymphocytes or progeny thereof, optionally by producing hybridomas therefrom; and
[0266] (e) isolating an antibody (e.g., an IgG-type antibody) expressed by the B lymphocytes.

[0267] In an example, the method comprises the step of isolating from said B lymphocytes nucleic acid encoding said antibody that binds said antigen; optionally exchanging the heavy chain constant region nucleotide sequence of the antibody with a nucleotide sequence encoding a human or humanised heavy chain constant region and optionally affinity maturing the variable region of said antibody; and optionally inserting said nucleic acid into an expression vector and optionally a host.

[0268] In an example, the method comprises making a mutant or derivative of the antibody produced by the method.

[0269] The invention provides the use of an isolated, monoclonal or polyclonal antibody described herein, or a mutant or derivative antibody thereof that binds said antigen, in the manufacture of a composition for use as a medicament.

[0270] The invention provides the use of an isolated, monoclonal or polyclonal antibody described herein, or a mutant or derivative antibody thereof that binds said antigen for use in medicine.

[0271] The invention provides a method of treating a patient in need thereof (e.g., a human patient), comprising administering a therapeutically effective amount of an isolated, monoclonal or polyclonal antibody described herein, or a mutant or derivative antibody thereof which binds an antigen.

[0272] The invention provides a nucleotide sequence encoding an antibody described herein, optionally wherein the nucleotide sequence is part of a vector. The invention also provides a host cell comprising said nucleotide sequence.

[0273] The invention provides a pharmaceutical composition comprising the antibody or antibodies described herein and a diluent, excipient or carrier.

[0274] The invention provides an ES cell, a non-human animal or a non-human blastocyst comprising an expressible genomically-integrated nucleotide sequence encoding a Cas endonuclease (e.g., a Cas9 or Cys4) and optionally an expressible genomically-integrated nucleotide sequence encoding a tracrRNA or a gRNA. For example, the ES cell is any ES cell type described herein.

[0275] In an example of the cell, animal or blastocyst, the endonuclease sequence is constitutively expressible.

[0276] In an example of the cell, animal or blastocyst, the endonuclease sequence is inducibly expressible.

[0277] In an example of the cell, animal or blastocyst the endonuclease sequence is expressible in a tissue-specific manner in the animal or a progeny thereof, or in a non-human animal that is a progeny of the cell or blastocyst.

[0278] In an example, the cell, animal or blastocyst comprises one or more gRNAs or an expressible nucleotide sequence encoding a gRNA or a plurality of expressible nucleotide sequences each encoding a different gRNA.

[0279] The invention provides the use of the cell, animal or blastocyst in a method according to any configuration, aspect, embodiment or example of the invention.

[0280] An aspect provides an antibody produced by the method of the invention, optionally for use in medicine, e.g., for treating and/or preventing (such as in a method of treating and/or preventing) a medical condition or disease in a patient, e.g., a human.

[0281] An aspect provides a nucleotide sequence encoding the antibody of the invention, optionally wherein the nucleotide sequence is part of a vector. Suitable vectors will be readily apparent to the skilled person, e.g., a conventional antibody expression vector comprising the nucleotide sequence together in operable linkage with one or more expression control elements.

[0282] An aspect provides a pharmaceutical composition comprising the antibody of the invention and a diluent, excipient or carrier, optionally wherein the composition is contained in an intravenous (IV) container (e.g., and TV bag) or a container connected to an IV syringe.

[0283] An aspect provides the use of the antibody of the invention in the manufacture of a medicament for the treatment and/or prophylaxis of a disease or condition in a patient, e.g. a human.

[0284] In a further aspect, the invention relates to humanised antibodies and antibody chains produced according to the present invention, both in chimaeric and fully humanised form, and use of said antibodies in medicine. The invention also relates to a pharmaceutical composition comprising such an antibody and a pharmaceutically acceptable carrier or other excipient.

[0285] Antibody chains containing human sequences, such as chimaeric human-non human antibody chains, are considered humanised herein by virtue of the presence of the human protein coding regions region. Fully human antibodies may be produced starting from DNA encoding a chimaeric antibody chain of the invention using standard techniques.

[0286] Methods for the generation of both monoclonal and polyclonal antibodies are well known in the art, and the present invention relates to both polyclonal and monoclonal antibodies of chimaeric or fully humanised antibodies produced in response to antigen challenge in non-human vertebrates of the present invention.

[0287] In a yet further aspect, chimaeric antibodies or antibody chains generated in the present invention may be manipulated, suitably at the DNA level, to generate molecules with antibody-like properties or structure, such as a human variable region from a heavy or light chain absent a constant region, for example a domain antibody; or a human variable region with any constant region from either heavy or light chain from the same or different species; or a human variable region with a non-naturally occurring constant region; or human variable region together with any other fusion partner. The invention relates to all such chimaeric antibody derivatives derived from chimaeric antibodies identified according to the present invention.

[0288] In a further aspect, the invention relates to use of animals of the present invention in the analysis of the likely effects of drugs and vaccines in the context of a quasi-human antibody repertoire.

[0289] The invention also relates to a method for identification or validation of a drug or vaccine, the method comprising delivering the vaccine or drug to a mammal of the invention and monitoring one or more of: the immune response, the safety profile; the effect on disease.

[0290] The invention also relates to a kit comprising an antibody or antibody derivative as disclosed herein and either instructions for use of such antibody or a suitable laboratory reagent, such as a buffer, antibody detection reagent.

[0291] It will be understood that particular embodiments described herein are shown by way of illustration and not as limitations of the invention. The principal features of this invention can be employed in various embodiments without departing from the scope of the invention. Those skilled in the art will recognize, or be able to ascertain using no more than routine study, numerous equivalents to the specific procedures described herein. Such equivalents are considered to be within the scope of this invention and are covered by the claims. All publications and patent applications mentioned in the specification are indicative of the level of skill of those skilled in the art to which this invention pertains. All publications and patent applications are herein incorporated by reference to the same extent as if each individual publication or patent application was specifically and individually indicated to be incorporated by reference. The use of the word “a” or “an” when used in conjunction with the term “comprising” in the claims and/or the specification may mean “one,” but it is also consistent with the meaning of “one or more,” “at least one,” and “one or more than one.” The use of the term “or” in the claims is used to mean “and/or” unless explicitly indicated to refer to alternatives only or the alternatives are mutually exclusive, although the disclosure supports a definition that refers to only alternatives and “and/or.” Throughout this application, the term “about” is used to indicate that a value includes the inherent variation of error for the device, the method being employed to determine the value, or the variation that exists among the study subjects.

[0292] As used in this specification and claim(s), the words “comprising” (and any form of comprising, such as “comprise” and “comprises”), “having” (and any form of having, such as “have” and “has”). “including” (and any form of including, such as “includes” and “include”) or “containing” (and any form of containing, such as “contains” and “contain”) are inclusive or open-ended and do not exclude additional, unrecited elements or method steps

[0293] The term “or combinations thereof” as used herein refers to all permutations and combinations of the listed items preceding the term. For example, “A, B, C, or combinations thereof is intended to include at least one of: A, B, C, AB, AC, BC, or ABC, and if order is important in a particular context, also BA, CA, CB, CBA, BCA, ACB, BAC, or CAB. Continuing with this example, expressly included are combinations that contain repeats of one or more item or term, such as BB, AAA, MB, BBC, AAABCCCC, CBBAAA, CABABB, and so forth. The skilled artisan will understand that typically there is no limit on the number of items or terms in any combination, unless otherwise apparent from the context.

[0294] Any part of this disclosure may be read in combination with any other part of the disclosure, unless otherwise apparent from the context.

[0295] All of the compositions and/or methods disclosed and claimed herein can be made and executed without undue experimentation in light of the present disclosure. While the compositions and methods of this invention have been described in terms of preferred embodiments, it will be apparent to those of skill in the art that variations may be applied to the compositions and/or methods and in the steps or in the sequence of steps of the method described herein without departing from the concept, spirit and scope of the invention. All such similar substitutes and modifications apparent to those skilled in the art are deemed to be within the spirit, scope and concept of the invention as defined by the appended claims.

### REFERENCES

[0296] 1. Cong L, Ran F A, Cox D, Lin S, Barretto R, Habib N, Hsu P D, Wu X, Jiang W, Marraffini L A et al: Multiplex genome engineering using CRISPR/Cas systems. Science 2013, 339(6121):819-823.
[0297] 2. Wang H, Yang H, Shivalila C S, Dawlaty M M, Cheng A W, Zhang F, Jaenisch R: One-step generation of mice carrying mutations in multiple genes by CRISPR/Cas-mediated genome engineering. Cell 2013, 153(4):910-918.
[0298] 3. Mali P, Yang L, Esvelt K M, Aach J, Guell M, DiCarlo J E, Norville J E, Church G M: RNA-guided human genome engineering via Cas9. Science 2013, 339(6121):823-826.
[0299] 4. Gaj T, Gersbach C A, Barbas C F, 3rd: ZFN, TALEN, and CRISPR/Cas-based methods for genome engineering. Trends Biotechnol 2013, 31(7):397-405.
[0300] 5. Perez-Pinera P, Ousterout D G, Gersbach C A: Advances in targeted genome editing. Curr Opin Chem Biol 2012, 16(3-4):268-277.
[0301] 6. Shah S A, Erdmann S, Mojica F J, Garrett R A: Protospacer recognition motifs: Mixed identities and functional diversity. RNA Biol 2013, 10(5).
[0302] 7. Haurwitz R E, Sternberg S H, Doudna J A: Csy4 relies on an unusual catalytic dyad to position and cleave CRISPR RNA. EMBO J 2012, 31(12):2824-2832.
[0303] 8. Yusa K, Zhou L, Li M A, Bradley A, Craig N L: A hyperactive piggyBac transposase for mammalian applications. Proc Natl Acad Sci USA 2011, 108(4):1531-1536.
[0304] 9. Qiao J, Oumard A, Wegloehner W, Bode J: Novel tag-and-exchange (RMCE) strategies generate master cell clones with predictable and stable transgene expression properties. J Mol Biol 2009, 390(4):579-594.
[0305] 10. Oumard A, Qiao J, Jostock T, Li J, Bode J: Recommended Method for Chromosome Exploitation: RMCE-based Cassette-exchange Systems in Animal Cell Biotechnology. Cytotechnology 2006, 50(1-3):93-108.

[0306] The present invention is described in more detail in the following non limiting exemplification.

[0307] Some embodiments of the technology described herein can be defined according to any of the following numbered paragraphs:
[0308] 1. A method of nucleic acid recombination, the method comprising
   [0309] (a) using Cas endonuclease-mediated nucleic acid cleavage to create first and second breaks in a nucleic acid strand, thereby creating 5′ and 3′ cut ends and a nucleotide sequence between the ends;
   [0310] (b) using homologous recombination to delete the nucleotide sequence; and
   [0311] (c) optionally obtaining the nucleic acid strand modified in step (b) or a progeny nucleic strand comprising the deletion.
[0312] 2. The method of paragraph 1, wherein the deleted sequence comprises a regulatory element or encodes all or part of a protein.
[0313] 3. The method of paragraph 2, wherein the deleted sequence comprises a protein subunit or domain.
[0314] 4. The method of any one of paragraphs 1 to 3, wherein the deletion of step (b) is at least 20 nucleotides long.
[0315] 5. The method of paragraph 1, further comprising a step of inserting a nucleotide sequence between the cut ends in (a).
[0316] 6. The method of paragraph 5, wherein the insert nucleotide sequence comprises a PAM motif.
[0317] 7. The method of paragraph 5 or paragraph 6, wherein the insert sequence is at least 10 nucleotides long.
[0318] 8. The method of any one of paragraphs 5 to 7, wherein recombinase recognition sequences are used to insert the nucleotide sequence, e.g. loxP and/or a mutant lox, e.g., lox2272 or lox511 or frt.
[0319] 9. The method of any one of paragraphs 5 to 7, wherein homologous recombination is used to insert the insert nucleotide sequence.
[0320] 10. The method of any one of paragraphs 5 to 9, wherein the method is carried out in a cell and the insert sequence replaces an orthologous or homologous sequence in the cell.
[0321] 11. The method of any preceding paragraph, wherein step (c) is performed by isolating a cell comprising the modified first strand, or by obtaining a non-human vertebrate in which the method has been performed or a progeny thereof.
[0322] 12. The method of any preceding paragraph, wherein the nucleic acid strand or the first strand is a DNA strand.
[0323] 13. The method of any preceding paragraph wherein the product of the method comprises a nucleic acid strand comprising a PAM motif 3′ of the insertion or deletion.
[0324] 14. The method of paragraph 13, wherein the PAM motif is no more than 10 nucleotides 3′ of the deletion.
[0325] 15. The method of any preceding paragraph, wherein step (b) is performed by carrying out homologous recombination between an incoming nucleic acid comprising first and second homology arms, wherein the homology arms are substantially homologous respectively to a sequence extending 5′ from the 5′ end and a sequence extending 3′ from the 3′ end.
[0326] 16. The method of paragraph 15, wherein step (b) is performed by carrying out homologous recombination between an incoming nucleic acid comprising an insert nucleotide sequence flanked by the first and second homology arms, wherein the insert nucleotide sequence is inserted between the 5′ and 3′ ends.
[0327] 17. The method of paragraph 15 or paragraph 16, wherein each homology arm is at least 20 contiguous nucleotides long.
[0328] 18. The method of any one of paragraphs 15 to 17, wherein the first and/or second homology arm comprises a recombinase recognition sequence, such as a PAM motif.
[0329] 19. The method of any preceding paragraph, wherein Cas endonuclease-mediated cleavage is used in step (a) and is carried out by recognition of a GG or NGG PAM motif.
[0330] 20. The method of paragraph 19, wherein a nickase is used to cut in step (a), and optionally, wherein the nickase is a Cas nickase.
[0331] 21. The method of any preceding paragraph, wherein the method is carried out in a cell, e.g. a eukaryotic cell.
[0332] 22. The method of paragraph 21, wherein the method is carried out in a mammalian cell, e.g. rodent or mouse cell, e.g. a rodent (e.g., mouse) ES cell or zygote.
[0333] 23. The method of any preceding paragraph, wherein the method is carried out in a non-human mammal, e.g. a mouse or rat or rabbit.
[0334] 24. The method of any preceding paragraph, wherein each cleavage site is flanked by PAM motif (e.g., a NGG or NGGNG sequence, wherein N is any base and G is a guanine).
[0335] 25. The method of any preceding paragraph, wherein the 3′ end is flanked 3′ by a PAM motif.
[0336] 26. The method of any preceding paragraph, wherein step (a) is carried out by cleavage in one single strand of dsDNA.
[0337] 27. The method of any preceding paragraph, wherein step (a) is carried out by combining in a cell the nucleic acid strand, a Cas endonuclease, a crRNA and a tracrRNA (e.g., provided by one or more gRNAs) for targeting the endonuclease to carry out the cleavage, and optionally an insert sequence for homologous recombination with the nucleic acid strand.
[0338] 28. The method of any preceding paragraph, wherein step (b) is performed by carrying out homologous recombination with an incoming nucleic acid comprising first and second homology arms, wherein the homology arms are substantially homologous respectively to a sequence extending 5′ from the 5′ end and a sequence extending 3′ from the 3′ end, wherein the second homology arm comprises a PAM sequence such that homologous recombination between the second homology arm and the sequence extending 3′ from the 3′ end produces a sequence comprising a PAM motif in the product of the method.
[0339] 29. A method of sequential endonuclease-mediated homology directed recombination (sEHDR) comprising carrying out the method of any preceding paragraph a first time and a second time, wherein the product of the first time is used for endonuclease-mediated cleavage the second time, whereby either (i) first and second nucleotide sequences are deleted the first time and the second times respectively; (ii) a first nucleotide sequence is deleted the first time and a second nucleotide sequence is inserted the second time; (iii) a first nucleotide sequence is inserted the first time and a second nucleotide sequence is deleted the second time; or (iv) first and second nucleotide sequences are inserted the first and second times respectively; optionally wherein the nucleic acid strand modification the second time is within 20 or less nucleotides of the nucleic acid strand modification the first time.
[0340] 30. The method of paragraph 29, wherein the first time is carried out according to paragraph 1, wherein the incoming nucleic acid comprises no sequence between the first and second homology arms, wherein sequence between the 5′ and 3′ ends is deleted by homologous recombination; and/or the second time is carried out according to paragraph 1, wherein step (b) is performed by carrying out homologous recombination between an incoming nucleic acid comprising first and second homology arms, wherein the homology arms are substantially homologous respectively to a sequence extending 5′ from the 5′ end and a sequence extending 3′ from the 3′ end, wherein the incoming nucleic acid comprises no sequence between the first and second homology arms such that sequence between the 5′ and 3′ ends is deleted by homologous recombination; optionally wherein the second arm comprises a PAM motif such that the product of the second time comprises a PAM motif for use in a subsequent Cas endonuclease-mediated method according to any one of paragraphs 1 to 28.
[0341] 31. The method of any preceding paragraph, wherein step (a) is carried out using Cas endonuclease-mediated cleavage and a gRNA comprising a crRNA and a tracrRNA.
[0342] 32. The method of paragraph 27 or 31, wherein the crRNA has the structure 5′-X-Y-3′, wherein X is an RNA nucleotide sequence (optionally at least 5 nucleotides long) and Y is an RNA sequence comprising a nucleotide motif that hybridises with a motif comprised by the tracrRNA, wherein X is capable of hybridising with a nucleotide sequence extending 5′ from the desired site of the 5′ cut end.
[0343] 33. The method of paragraph 27, 31 or 32, wherein Y is 5′-N₁UUUUAN₂N3GCUA-3′, wherein each of N₁₋₃ is a A, U, C or G and/or the tracrRNA comprises the sequence (in 5′ to 3′ orientation) UAGCM₁UUAAAAM₂, wherein M₁ is spacer nucleotide sequence and M₂ is a nucleotide.
[0344] 34. A method of nucleic acid recombination, the method comprising providing dsDNA comprising first and second strands and
   [0345] (a) using Cas endonuclease-mediated nucleic acid cleavage to create a cut end in the first strand 3′ of a PAM motif;
   [0346] (b) using Cas endonuclease-mediated nucleic acid cleavage to create a cut in the second strand at a position which corresponds to a position 3′ of the cut end of the strand of part (a), which cut is 3′ of the PAM motif,
   [0347] (c) providing a first gRNA which hybridises with a sequence 5′ to the PAM motif in the strand of part (a)
   [0348] (d) providing a second gRNA which hybridises with a sequence 5′ to the PAM motif in the strand of part (b)
      wherein the nucleic acid strands of part (a) and part (b) are repaired to produce a deletion of nucleic acid between the cuts.
[0349] 35. A method of producing a cell or a transgenic non-human organism, the method comprising:
   [0350] (a) carrying out the method of any preceding paragraph to (i) knock out a target nucleotide sequence in the genome of a first cell and/or (ii) knock in an insert nucleotide sequence into the genome of a first cell, optionally wherein the insert sequence replaces a target sequence in whole or in part at the endogenous location of the target sequence in the genome; wherein the cell or a progeny thereof can develop into a non-human organism or cell; and
   [0351] (b) developing the cell or progeny into a non-human organism or a non-human cell.
[0352] 36. The method of paragraph 35, wherein the organism or cell is homozygous for the modification (i) and/or (ii).
[0353] 37. The method of paragraph 35 or 36, wherein the cell is an ES cell, iPS cell, totipotent cell or pluripotent cell, optionally a rodent (e.g., a mouse or rat) cell.
[0354] 38. The method of any one of paragraphs 35 to 37, wherein the target sequence is an endogenous sequence comprising all or part of a regulatory element or encoding all or part of a protein.
[0355] 39. The method of any one of paragraphs 35 to 38, wherein the insert sequence is a synthetic sequence; or comprises a sequence encoding all or part of a protein from a species other than the species from which the first cell is derived; or comprises a regulatory element from said first species.
[0356] 40. The method of paragraph 39, wherein the insert sequence encodes all or part of a human protein or a human protein subunit or domain.
[0357] 41. A cell or a non-human organism whose genome comprises a modification comprising a non-endogenous nucleotide sequence flanked by endogenous nucleotide sequences, wherein the cell or organism is obtainable by the method of any one of paragraphs 26 to 40 and wherein the non-endogenous sequence is flanked 3′ by a Cas PAM motif; wherein the cell is not comprised by a human; and one, more or all of (a) to (d) applies
   [0358] (a) the genome is homozygous for the modification; or comprises the modification at one allele and is unmodified by Cas-mediated homologous recombination at the other allele;
   [0359] (b) the non-endogenous sequence comprises all or part of a regulatory element or encodes all or part of a protein;
   [0360] (c) the non-endogenous sequence is at least 20 nucleotides long;
   [0361] (d) the non-endogenous sequence replaces an orthologous or homologous sequence in the genome.
[0362] 42. The cell or organism of paragraph 41, wherein the non-endogenous sequence is a human sequence.
[0363] 43. The cell or organism of paragraph 41 or 42, wherein the PAM motif comprises a sequence selected from CCN, TCN, TTC, AWG, CC, NNAGNN. NGGNG GG, NGG, WGG, CWT, CTT and GAA.
[0364] 44. The cell or organism of any one of paragraphs 41 to 43, wherein there is a PAM motif no more than 10 nucleotides (e.g., 3 nucleotides) 3′ of the non-endogenous sequence.
[0365] 45. The cell or organism of any one of paragraphs 41 to 44, wherein the PAM motif is recognised by a Streptococcus Cas9.
[0366] 46. The cell or organism of any one of paragraphs 41 to 45, which is a non-human vertebrate cell or a non-human vertebrate that expresses one or more human antibody heavy chain variable domains (and optionally no heavy chain variable domains of a non-human vertebrate species).
[0367] 47. The cell or organism of any one of paragraphs 41 to 46, which is a non-human vertebrate cell or a non-human vertebrate that expresses one or more human antibody kappa light chain variable domains (and optionally no kappa light chain variable domains of a non-human vertebrate species) or that expresses one or more human antibody lambda light chain variable domains (and optionally no kappa light chain variable domains of a non-human vertebrate species).
[0368] 48. The cell or organism of any paragraph 46 or paragraph 47, wherein the non-endogenous sequence encodes a human Fc receptor protein or subunit or domain thereof (e.g., a human FcRn or Fcγ receptor protein, subunit or domain).
[0369] 49. The cell or organism of any one of paragraphs 41 to 48, wherein the non-endogenous sequence comprises one or more human antibody gene segments, an antibody variable region or an antibody constant region.
[0370] 50. The cell or organism of any one of paragraphs 41 to 49, wherein the insert sequence is a human sequence that replaces or supplements an orthologous non-human sequence.
[0371] 51. A monoclonal or polyclonal antibody prepared by immunisation of a vertebrate (e.g., mouse or rat) according to any one of paragraphs 41 to 50 with an antigen.
[0372] 52. A method of isolating an antibody that binds a predetermined antigen, the method comprising
   [0373] (a) providing a vertebrate (optionally a mouse or rat) according to any one of paragraphs 41 to 51;
   [0374] (b) immunising said vertebrate with said antigen;
   [0375] (c) removing B lymphocytes from the vertebrate and selecting one or more B lymphocytes expressing antibodies that bind to the antigen;
   [0376] (d) optionally immortalising said selected B lymphocytes or progeny thereof, optionally by producing hybridomas therefrom; and
   [0377] (e) isolating an antibody (e.g., and IgG-type antibody) expressed by the B lymphocytes.
[0378] 53. The method of paragraph 52, comprising the step of isolating from said B lymphocytes nucleic acid encoding said antibody that binds said antigen; optionally exchanging the heavy chain constant region nucleotide sequence of the antibody with a nucleotide sequence encoding a human or humanised heavy chain constant region and optionally affinity maturing the variable region of said antibody; and optionally inserting said nucleic acid into an expression vector and optionally a host.
[0379] 54. The method of paragraph 52 or 53, further comprising making a mutant or derivative of the antibody produced by the method of paragraph 52 or 53.
[0380] 55. The use of an isolated, monoclonal or polyclonal antibody according to paragraph 51, or a mutant or derivative antibody thereof that binds said antigen, in the manufacture of a composition for use as a medicament.
[0381] 56. The use of an isolated, monoclonal or polyclonal antibody according to paragraph 51, or a mutant or derivative antibody thereof that binds said antigen for use in medicine.
[0382] 57. A nucleotide sequence encoding an antibody of paragraph 51, optionally wherein the nucleotide sequence is part of a vector.
[0383] 58. A pharmaceutical composition comprising the antibody or antibodies of paragraph 51 and a diluent, excipient or carrier.
[0384] 59. An ES cell, a eukaryotic cell, a mammalian cell, a non-human animal or a non-human blastocyst comprising an expressible genomically-integrated nucleotide sequence encoding a Cas endonuclease.
[0385] 60. The cell, animal or blastocyst of paragraph 59, wherein the endonuclease sequence is constitutively expressible.
[0386] 61. The cell, animal or blastocyst of paragraph 59, wherein the endonuclease sequence is inducibly expressible.
[0387] 62. The cell, animal or blastocyst of paragraph 59, 60 or 61, wherein the endonuclease sequence is expressible in a tissue-specific or stage-specific manner in the animal or a progeny thereof, or in a non-human animal that is a progeny of the cell or blastocyst.
[0388] 63. The cell or animal of paragraph 62, wherein the cell is a non-human embryo cell or the animal is a non-human embryo, wherein the endonuclease sequence is expressible or expressed in the cell or embryo.
[0389] 64. The cell of animal paragraph 63, wherein the endonuclease is operatively linked to a promoter selected from the group consisting of an embryo-specific promoter (e.g., a Nanog promoter, a Pou5fl promoter or a SoxB promoter).
[0390] 65. The cell, animal or blastocyst of any one of paragraphs 61 to 64, wherein the Cas endonuclease is at a Rosa 26 locus, and is optionally operably linked to a Rosa 26 promoter.
[0391] 66. The cell, animal or blastocyst of any one of paragraphs 59 to 62, wherein the Cas endonuclease sequence is flanked 5′ and 3′ by transposon elements (e.g., inverted piggyBac terminal elements) or site-specific recombination sites (e.g., loxP and/or a mutant lox, e.g., lox2272 or lox511; or frt).
[0392] 67. The cell, animal or blastocyst of paragraph 66, comprising one or more restriction endonuclease sites between the Cas endonuclease sequence and a transposon element.
[0393] 68. The cell, animal or blastocyst of any one of paragraphs 59 to 67 comprising one or more gRNAs.
[0394] 69. The cell, animal or blastocyst of paragraph 66, 67 or 68, wherein the gRNA(s) are flanked 5′ and 3′ by transposon elements (e.g., inverted piggyBac terminal elements) or site-specific recombination sites (e.g., loxP and/or a mutant lox, e.g., lox2272 or lox511; or frt).
[0395] 70. Use of the cell, animal or blastocyst of any one of paragraphs 59 to 69 in a method according to any one of paragraphs 1 to 50.

### EXAMPLES

### Example 1

### Precise DNA Modifications

### (a) Use of Nickase for HDR

[0396] It has been reported that the Cas9 nuclease can be converted into a nickase through the substitution of an aspartate to alanine (D10A) in the RuvCl domain of SpCas9 (Cong et al.). It is noteworthy that DNA single-stranded breaks are preferentially repaired through the HDR pathway. The Cas9 D10A nickase, when in a complex with mature crRNA:tracrRNA, can specifically induce DNA nicking at a precise location. With this in mind, we propose extending the application of the CRISPR/Cas system by creating a nick in a given location in a genome using Cas9 D10A nickase and then exploiting the HDR pathway for inserting a single-stranded DNA fragment (endogenous or exogenous) which will contain DNA homology (typically for recombineering, 50 bp is enough for efficient recombination) flanking the nicked DNA junction to bring in and insert a given DNA in a precision location; similar size homology will be used with the present example (FIG. 1A). Guide RNA (gRNA) will be design individually per target protospacer sequence or incorporated into a single CRISPR array encoding for 2 or more spacer sequences allowing multiplex genome editing from a single CRSPR array.

### (b) Example of Precise DNA Deletion

[0397] To demonstrate precise deletion using Cas9 in association with gRNA and no targeting vector or donor DNA, we designed two gRNA within a gene, which were 55 bp apart. The two gRNA were on opposite DNA strands as shown in FIG. 9.

[0398] Mouse ES cells were transfected with human Cas9 nuclease and the two gRNAs. The transfection procedure was carried out as detailed above but the resulting clones were not selected. The transfected ES clones were genotyped using oligos pair spanning the two gRNA (Primer 1 & 2) to detect specific 55 bp deletion (FIG. 10).

[0399] Most of the clones did not show the specific 55 bp deletion, however, clones were clearly identified which contained the defined deletion. Out of the 384 clones analysed, approximately 4% of the clones were found to contain the specific 55 bp deletion. Note: Not all the genotyping data is shown. The clones containing the specific 55 bp deletion were further analysed by sequencing the PCR products as a final confirmation (data not shown). Furthermore, where we saw the specific deletion, we observed both alleles to contain the specific deletion. These data confirmed that when two gRNAs are used, a precise and specific deletion can be made without the requirement for a targeting vector. However we can assume the efficiency of the define deletion can be greatly enhance using the two gRNA combination together with a targeting vector or a donor DNA fragment containing homology arms flanking the intended deletion region.

### (c) Alternative Methodology for Deletion of DNA

[0400] In a separate setting, two gRNA or a single CRISPR array encoding multiple spacer sequence can be designed flanking a gene or a region of interest and with the association of Cas9 D10A nickase, two separate single-stranded breaks can be induced. This, in association with a single-stranded DNA fragment containing DNA homology to the 5′ breakpoint junction of the first DNA nick, and DNA homology to the 3′ breakpoint junction of the second nick, the region in between the two single stranded DNA nick can be precisely deleted (FIG. 2A).

### (d) Alternative Methodology for Replacement of DNA

[0401] In an another setting, two separate gRNA or a multiplex single CRISPR array can be designed flanking a gene or a region of interest and with the association of Cas9 D10A nickase two separate single-stranded breaks can be induced. In this case the intruding single stranded DNA fragment (or double stranded DNA) can contain DNA sequence from either endogenous or exogenous source containing sequence for a known gene, regulatory element promoter etc. This single-stranded DNA fragment (or double stranded DNA) can be brought together to replace the DNA region of interest flanked by DNA nick by arming it with DNA homology from the 5′ region of the first nick and 3′ region from the second nick (FIG. 3A). Due to the high efficiency of the CRISPR/Cas system to cleave DNA, the above proposed strategy will not require introduction of any selection marker, thus creating exact seamless genome editing in a precise and defined manner. As an option, a selection marker can be included flanked by Piggy Bac LTRs to allow for the direct selection of correctly modified clones. Once the correct clones have been identified, the selection marker can be removed conveniently through the expression of hyperactive piggyBac transposase (Yusa K., Zhou L., Li M., Bradley A., Craig N. L.: A hyperactive piggyBac transposase for mammalian applications, Proc. Natl. Acad. Sci. USA, 2011, 108(4):1531-1536). Furthermore, the above approaches can be applied to ES cells, mammalian cells, yeast cells, bacterial cells, plant cells as well as directly performing in zygotes to expedite the process of homozygous genome engineering in record time. It would be also possible to multiplex this system to generate multiple simultaneous DNA insertions (KI), deletions (KO) and the sequential deletion and insertion (KO→KI).

(e) Example of DNA Deletion and Insertion in a predefined location (KO→KI)

[0402] To demonstrate a desired DNA region can be manipulated using Cas9, a single guide RNA (gRNA) was selected at a desired region (Exon 1 of gene X) FIG. 7. A targeting vector was also constructed, which contained approximately 300 bp homology arms (5′ and 3′ HA) flanking the gRNA. The homology arms will hybridise exactly in the defined region and thus delete a 50 bp region, which is intended for deletion. The targeting vector also allows for the insertion of any DNA sequence of interest. In this proof of concept experiment, we included an approximate 1.6 kb PGK-puromycin cassette. The guide RNA (0.5 ug) together with the targeting vector (1 ug) and Cas9 nuclease vector (1 ug) was transfected into ES cells and 96 clones were picked after selection on puromycin using the protocol described above. Note. As a test for targeting efficiency, we compared linear verses circular targeting vector. Also as a negative control, we did the same experiment using no Cas9 vector to compare targeting efficiency via homologous recombination with and without Cas9 expression.

[0403] All the selected clones were puromycin resistant and the 96 clones picked from each of the four transfections were genotyped using the oligo pair HAP341/HAP334. Correctly targeted clones yielded an 880 bp PCR product. The resulting genotyping data is shown in FIG. 8.

[0404] From the genotyping data of this experiment, it can be seen that Cas9 mediated double stranded DNA break greatly improves homologous recombination efficiency of the targeting vector as 62% and 49% of the clones using circular or linear targeting vector respectively were correctly targeted verse only a single targeted clone using circular targeting vector when no Cas9 was used. Also it can be seen from this data that the circular targeting vector yielded slightly better targeting efficiency than when linear vector was used but a general conclusion cannot be drawn from this single experiment but to say, both circular and linear targeting vector yielded greatly improved targeting efficiency when associated with Cas9 and a specific guide RNA. This experiment also demonstrated that using Cas9 to create a define DNA breakage can be used to delete out a defined DNA region and subsequently insert any DNA fragment of interest

### Example 2

### Recycling PAM for Sequential Insertions or Deletions

[0405] In certain settings it may be useful to edit a genome by chromosome walking. Using any of the three examples outlined above, it could be possible to carry out sequential genome editing in a stepwise fashion whereby the PAM sequence used in a previous round of CRISPR/Cas mediated genome editing, can be re-used to carry out multiple rounds of genome editing such as deletions, insertions or the simultaneous deletion and insertion. An example of sequential deletion whereby the PAM sequence from the previous genome editing step is recycled is shown in FIG. 4A. Using the PAM recycling approach, it is possible to carry out sequential insertions as well as sequential simultaneous deletion and insertion.

[0406] The PAM sequence us recycled through reintroducing it via homologous recombination and as part of the homology arm. The PAM sequence can be optionally accompanied by a unique guide-RNA sequence creating a novel site within the host genome for further round of genome editing

### Example 3

### Rapid Insertion of Lox Sites Using CRISPR/Cas System

[0407] Targeting efficiency using conventional homologous recombination methods in ES cells is low. In a different setting, the CRISPR/Cas system can be used to rapidly and efficiently introduce lox sites or other recombinase recognition sequence such as Frt in a defined location to act as a landing pad for genome editing using recombinase mediated cassette exchange (RMCE) (Qiao J., Oumard A., Wegloehner W., Bode J.: Novel tag-and-exchange (RMCE) strategies generate master cell clones with predictable and stable transgene expression properties, J. Mol. Biol., 2009, 390(4):579-594; and Oumard A., Qiao J., Jostock T., Li J., Bode J.: Recommended Method for Chromosome Exploitation: RMCE-based Cassette-exchange Systems in Animal Cell Biotechnology, Cytotechnology, 2006, 50(1-3):93-108). Once the lox sites are introduced into the genome, inversion, deletion or cassette exchange to delete and introduce DNA fragment varying in size at this site can be efficiently conducted via expression of Cre recombinase. An example of CRISPR/Cas mediated lox insertion followed by RMCE is shown in FIG. 5A. The RMCE step can be used to invert the region flanked by lox site or to delete this region as well as to simultaneously delete and insert DNA of interest in this region. Furthermore, the RMCE step can be adapted for carrying out multiple sequential rounds of RMCE (sRMCE).

### Example 4A

[0408] Reference is made to FIG. 6A. A piggyBac transposon harbouring a PGK promoter-driven loxP/mutant lox-flanked neo^{R} gene is targeted into an ES cell genome by standard homologous recombination. The targeted clones can be selected by G418. This provides a landing pad for the following recombinase-mediated cassette exchange (RMCE). Such an ES clone can be used a parental cells for any modification further. A cassette containing the loxP/mutant lox-flanked promoterless PuroΔTK-T2A-Cas9 and U6 polymerase III promoter-driven guide RNA (gRNA) genes are inserted into the landing pad through transient cre expression. The gRNA genes can be one or more than one which target to the same gene or different genes. The inserted clones can be selected with puromycin and confirmed by junction PCRs. During the selection, the expression of Cas9 and gRNAs from the inserted cassette results in more efficient gene targeting or modification than transient expression of the Cas9 and gRNA can achieve. Following 4-6 day selection, the whole modified cassette is excised by the transient expression of piggyBac transposase (PBase). The final ES cell clones would not contain any Cas9 or gRNA sequence. The clones with homozygous modified genes would be confirmed by PCR and sequence.

[0409] The main feature of this invention is to control the Cas9 and gRNA expression in certain time to be sufficient to generate efficient targeting rates.

### Example 4B

### Single Copy Cas9 Expression

[0410] As detailed in example 6, to demonstrate the single and stable expression of Cas9 from within the chromosome of a cell, we targeted a landing pad vector into Rosa26 allele on chromosome 6. DNA homology arms were used to target the landing pad vector in between exons 2 and 3 of Rosa26. The landing pad vector was targeted into ES cells using procedure described above. The transfected ES clones were selected on G418 and genotyped for correct targeting (FIG. 11) by PCR amplifying the 5′ and 3′ homology arm junctions.

[0411] Targeting of the landing pad yielded many targeted ES clones. A selection of the targeted clones were used to insert a DNA cassette containing Cas9 nuclease linked to Puro-delta-tk via a T2A sequence into the targeted landing pad via RMCE, which involved the expression of Cre recombinase. The corresponding loxP and lo2272 sites within both the landing pad and the incoming vector ensured correct orientation of insertion. Since the landing pad contained a geneless PGK promoter, correct insertion of the incoming vector DNA containing Cas9, activated expression of puromycin and thus clones were positively selected on puromycin. Non-specific targeting of this DNA cassette will not yield puromycin resistant clones due to the absence of a promoter driving the transcription of the promoterless puromycin gene in the inserted DNA cassette. The initial Cas9 vector inserted into the landing pad did not contain any guide RNA sequence. The puromycin resistant ES clones were genotyped by PCR for the correct insertion of Cas9 (FIG. 12).

[0412] As expected owing to the positive selection, most of the clones genotyped for insertion of the Cas9 vector were correctly targeted via RMCE based on the PCR genotyping results. Two of the correct clones (KHK1.6 Z2-24-27 and KHK1.10Z2-25-4 referred to as positive Z clones) which now contain the single copy Cas9 integrated into the Rosa26 gene as a single copy were used to test whether the Cas9 expression was sufficient enough to induce Cas9 mediated genome editing. Into the two positive Z clones, guide RNA against a gene referred to as gene Y was transfected using procedure described above. Following transfection and expansion of the resulting ES clones, 36 individual clones were isolated from each transfection and analysed initially by PCR using oligo flanking the guide RNA (FIG. 13).

[0413] Most of the clones yielded a PCR product of size equivalent to the positive control PCR where DNA from mouse AB2.1 ES cells was used. However, it can be seen clearly that some clones yielded a PCR product distinctively smaller than that of the positive control suggesting these clones contain a significant deletion via indel. To verify this and to check whether the rest of the PCR products though similar in size to the positive control did not contain indels, all the PCR products were purified using Qiagen gel extraction kit and analysed by sequencing. The sequencing data confirmed significant deletion for those PCR products that yielded shorter products than the positive control. It also highlighted, some of the other clones with similar PCR product size to the positive control to contain indels, which included various combinations of insertion and deletion (Sequencing data not shown). Out of the clones analysed, 18% of them contained an indel. These data clearly demonstrated that a single copy expression of Cas9 can be used to carry out genome editing and these clones can now be used as a Cas9 host cells for carrying out a multitude of genome editing. These ES clones are now being used to generate transgenic mouse lines whereby we can carry out a one-step genome editing by injecting only guide mRNA directly into zygotes without the requirement for transcribing Cas9 mRNA to simplify the one-step genome editing protocol.

### Example 5(A)

### Methodology

### A: Reconstructing CRISPR/Cas Vector System (Nuclease)

[0414] The CRISPR/Cas genome editing system has been reconstructed in vitro and exemplified in mouse embryonic stem cells using vector pX330 containing humanised S. pyogenes (hSpCsn1) (Cong et al.). The CRISPR/Cas system can be reconstructed as described m Cong et al using synthetic DNA strings and DNA assembly. In the present example, the entire DNA assembly would constitute a 6006 bp fragment containing 45 bp homology to pBlueScript KS+ vector 5′ to the EcoRV cutting site. Human U6 promoter, two BbsI restriction sites for cloning in the spacer sequence which fuses to a chimeric guided RNA sequence, chicken beta-actin promoter with 3 FLAG, nuclear localisation signal (NLS) followed by hSpCsn1 sequence and another NLS, bGH polyA, inverted terminal repeat sequence and finally another 45 bp homology to pBlueScript KS+3′ to the EcoRV cutting site. This 6006 bp stretch of DNA will be synthesized as 7 individual DNA fragments where each fragment will have a 45 bp overlap to the adjacent DNA fragment to allow DNA assembly. The DNA sequence of these fragments is shown below in the order of assembly.

Fragment 1A (1340 bp)
(SEQ ID NO: 7)
GGTACCGGGCCCCCCCTCGAGGTCGACGGTATCGATAAGCTTGATGAGGGCCTATTTCCATGATTCCTTCATATTTGCA
TATACGATACAAGGCTGTTAGAGAGATAATTGGAATTAATTTGACTGTAAACACAAAGATATTAGTACAAAATACGTGA
CGTAGAAAGTAATAATTTCTTGGGTAGTTTGCAGTTTTAAAATTATGTTTTAAAATGGACTATCATATGCTTACCGTAA
CTTGAAAGTATTTCGATTTCTTGGCTTTATATATCTTGTGGAAAGGACGAAACACCGGGTCTTCGAGAAGACCTGTTTT
AGAGCTAGAAATAGCAAGTTAAAATAAGGCTAGTCCGTTATCAACTTGAAAAAGTGGCACCGAGTCGGTGCTTTTTTGT
TTTAGAGCTAGAAATAGCAAGTTAAAATAAGGCTAGTCCGTTTTTAGCGCGTGCGCCAATTCTGCAGACAAATGGCTCT
AGAGGTACCCGTTACATAACTTACGGTAAATGGCCCGCCTGGCTGACCGCCCAACGACCCCCGCCCATTGACGTCAATA
GTAACGCCAATAGGGACTTTCCATTGACGTCAATGGGTGGAGTATTTACGGTAAACTGCCCACTTGGCAGTACATCAAG
TGTATCATATGCCAAGTACGCCCCCTATTGACGTCAATGACGGTAAATGGCCCGCCTGGCATTGTGCCCAGTACATGAC
CTTATGGGACTTTCCTACTTGGCAGTACATCTACGTATTAGTCATCGCTATTACCATGGTCGAGGTGAGCCCCACGTTC
TGCTTCACTCTCCCCATCTCCCCCCCCTCCCCACCCCCAATTTTGTATTTATTTATTTTTTAATTATTTTGTGCAGCGA
TGGGGGCGGGGGGGGGGGGGGGGCGCGCGCCAGGCGGGGCGGGGCGGGGCGAGGGGCGGGGCGGGGCGAGGCGGAGAGG
TGCGGCGGCAGCCAATCAGAGCGGCGCGCTCCGAAAGTTTCCTTTTATGGCGAGGCGGCGGCGGCGGCGGCCCTATAAA
AAGCGAAGCGCGCGGCGGGCGGGAGTCGCTGCGACGCTGCCTTCGCCCCGTGCCCCGCTCCGCCGCCGCCTCGCGCCGC
CCGCCCCGGCTCTGACTGACCGCGTTACTCCCACAGGTGAGCGGGCGGGACGGCCCTTCTCCTCCGGGCTGTAATTAGC
TGAGCAAGAGGTAAGGGTTTAAGGGATGGTTGGTTGGTGGGGTATTAATGTTTAATTACCTGGAGCACCTGCCTGAAAT
CACTTTTTTTCAGGTTGGACCGGTGCCACCATGGACTATAAGGACCACGACGGAGACTACAAGGATCATGATATT
Fragment 2 (852 bp)
(SEQ ID NO: 8)
ATGGACTATAAGGACCACGACGGAGACTACAAGGATCATGATATTGATTACAAAGACGATGACGATAAGATGGCCCCAA
AGAAGAAGCGGAAGGTCGGTATCCACGGAGTCCCAGCAGCCGACAAGAAGTACAGCATCGGCCTGGACATCGGCACCAA
CTCTGTGGGCTGGGCCGTGATCACCGACGAGTACAAGGTGCCCAGCAAGAAATTCAAGGTGCTGGGCAACACCGACCGG
CACAGCATCAAGAAGAACCTGATCGGAGCCCTGCTGTTCGACAGCGGCGAAACAGCCGAGGCCACCCGGCTGAAGAGAA
CCGCCAGAAGAAGATACACCAGACGGAAGAACCGGATCTGCTATCTGCAAGAGATCTTCAGCAACGAGATGGCCAAGGT
GGACGACAGCTTCTTCCACAGACTGGAAGAGTCCTTCCTGGTGGAAGAGGATAAGAAGCACGAGCGGCACCCCATCTTC
GGCAACATCGTGGACGAGGTGGCCTACCACGAGAAGTACCCCACCATCTACCACCTGAGAAAGAAACTGGTGGACAGCA
CCGACAAGGCCGACCTGCGGCTGATCTATCTGGCCCTGGCCCACATGATCAAGTTCCGGGGCCACTTCCTGATCGAGGG
CGACCTGAACCCCGACAACAGCGACGTGGACAAGCTGTTCATCCAGCTGGTGCAGACCTACAACCAGCTGTTCGAGGAA
AACCCCATCAACGCCAGCGGCGTGGACGCCAAGGCCATCCTGTCTGCCAGACTGAGCAAGAGCAGACGGCTGGAAAATC
TGATCGCCCAGCTGCCCGGCGAGAAGAAGAATGGCCTGTTCGGAAACCTGATTGCCCTGAGC
Fragment 3 (920 bp)
(SEQ ID NO: 9)
GGCGAGAAGAAGAATGGCCTGTTCGGAAACCTGATTGCCCTGAGCCTGGGCCTGACCCCCAACTTCAAGAGCAACTTCG
ACCTGGCCGAGGATGCCAAACTGCAGCTGAGCAAGGACACCTACGACGACGACCTGGACAACCTGCTGGCCCAGATCGG
CGACCAGTACGCCGACCTGTTTCTGGCCGCCAAGAACCTGTCCGACGCCATCCTGCTGAGCGACATCCTGAGAGTGAAC
ACCGAGATCACCAAGGCCCCCCTGAGCGCCTCTATGATCAAGAGATACGACGAGCACCACCAGGACCTGACCCTGCTGA
AAGCTCTCGTGCGGCAGCAGCTGCCTGAGAAGTACAAAGAGATTTTCTTCGACCAGAGCAAGAACGGCTACGCCGGCTA
CATTGACGGCGGAGCCAGCCAGGAAGAGTTCTACAAGTTCATCAAGCCCATCCTGGAAAAGATGGACGGCACCGAGGAA
CTGCTCGTGAAGCTGAACAGAGAGGACCTGCTGCGGAAGCAGCGGACCTTCGACAACGGCAGCATCCCCCACCAGATCC
ACCTGGGAGAGCTGCACGCCATTCTGCGGCGGCAGGAAGATTTTTACCCATTCCTGAAGGACAACCGGGAAAAGATCGA
GAAGATCCTGACCTTCCGCATCCCCTACTACGTGGGCCCTCTGGCCAGGGGAAACAGCAGATTCGCCTGGATGACCAGA
AAGAGCGAGGAAACCATCACCCCCTGGAACTTCGAGGAAGTGGTGGACAAGGGCGCTTCCGCCCAGAGCTTCATCGAGC
GGATGACCAACTTCGATAAGAACCTGCCCAACGAGAAGGTGCTGCCCAAGCACAGCCTGCTGTACGAGTACTTCACCGT
GTATAACGAGCTGACCAAAGTGAAATACGTGACCGAGGGAATGAGAAAGCC
Fragment 4 (920 bp)
(SEQ ID NO: 10)
CGAGCTGACCAAAGTGAAATACGTGACCGAGGGAATGAGAAAGCCCGCCTTCCTGAGCGGCGAGCAGAAAAAGGCCATC
GTGGACCTGCTGTTCAAGACCAACCGGAAAGTGACCGTGAAGCAGCTGAAAGAGGACTACTTCAAGAAAATCGAGTGCT
TCGACTCCGTGGAAATCTCCGGCGTGGAAGATCGGTTCAACGCCTCCCTGGGCACATACCACGATCTGCTGAAAATTAT
CAAGGACAAGGACTTCCTGGACAATGAGGAAAACGAGGACATTCTGGAAGATATCGTGCTGACCCTGACACTGTTTTGA
GGACAGAGAGATGATCGAGGAACGGCTGAAAACCTATGCCCACCTGTTCGACGACAAAGTGATGAAGCAGCTGAAGCGG
CGGAGATACACCGGCTGGGGCAGGCTGAGCCGGAAGCTGATCAACGGCATCCGGGACAAGCAGTCCGGCAAGACAATCC
TGGATTTCCTGAAGTCCGACGGCTTCGCCAACAGAAACTTCATGCAGCTGATCCACGACGACAGCCTGACCTTTAAAGA
GGACATCCAGAAAGCCCAGGTGTCCGGCCAGGGCGATAGCCTGCACGAGCACATTGCCAATCTGGCCGGCAGCCCCGCC
ATTAAGAAGGGCATCCTGCAGACAGTGAAGGTGGTGGACGAGCTCGTGAAAGTGATGGGCCGGCACAAGCCCGGAACAT
CGTGATCGAAATGGCCAGAGAGAACCAGACCACCCAGAAGGGACAGAAGAACAGCCGCGAGAGAATGAAGCGGATCGAA
GAGGGCATCAAAGAGCTGGGCAGCCAGATCCTGAAAGAACACCCCGTGGAAAACACCCAGCTGCAGAACGAGAAGCTGT
ACCTGTACTACCTGCAGAATGGGCGGGATATGTACGTGGACCAGGAACTGG
Fragment 5 (920 bp)
(SEQ ID NO: 11)
ACTACCTGCAGAATGGGCGGGATATGTACGTGGACCAGGAACTGGACATCAACCGGCTGTCCGACTACGATGTGGACCA
TATCGTGCCTCAGAGCTTTCTGAAGGACGACTCCATCGACAACAAGGTGCTGACCAGAAGCGACAAGAACCGGGGCAAG
AGCGACAACGTGCCCTCCGAAGAGGTCGTGAAGAAGATGAAGAACTACTGGCGGCAGCTGCTGAACGCCAAGCTGATTA
CCCAGAGAAAGTTCGACAATCTGACCAAGGCCGAGAGAGGCGGCCTGAGCGAACTGGATAAGGCCGGCTTCATCAAGAG
ACAGCTGGTGGAAACCCGGCAGATCACAAAGCACGTGGCACAGATCCTGGACTCCCGGATGAACACTAAGTACGACGAG
AATGACAAGCTGATCCGGGAAGTGAAAGTGATCACCCTGAAGTCCAAGCTGGTGTCCGATTTCCGGAAGGATTTCCAGT
TTTACAAAGTGCGCGAGATCAACAACTACCACCACGCCCACGACGCCTACCTGAACGCCGTCGTGGGAACCGCCCTGAT
CAAAAAGTACCCTAAGCTGGAAAGCGAGTTCGTGTACGGCGACTACAAGGTGTACGACGTGCGGAAGATGATCGCCAAG
AGCGAGCAGGAAATCGGCAAGGCTACCGCCAAGTACTTCTTCTACAGCAACATCATGAACTTTTTCAAGACCGAGATTA
CCCTGGCCAACGGCGAGATCCGGAAGCGGCCTCTGATCGAGACAAACGGCGAAACCGGGGAGATCGTGTGGGATAAGGG
CCGGGATTTTGCCACCGTGCGGAAAGTGCTGAGCATGCCCCAAGTGAATATCGTGAAAAAGACCGAGGTGCAGACAGGC
GGCTTCAGCAAAGAGTCTATCCTGCCCAAGAGGAACAGCGATAAGCTGATC
Fragment 6 (789 bp)
(SEQ ID NO: 12)
AGCAAAGAGTCTATCCTGCCCAAGAGGAACAGCGATAAGCTGATCGCCAGAAAGAAGGACTGGGACCCTAAGAAGTACG
GCGGCTTCGACAGCCCCACCGTGGCCTATTCTGTGCTGGTGGTGGCCAAAGTGGAAAAGGGCAAGTCCAAGAAACTGAA
GAGTGTGAAAGAGCTGCTGGGGATCACCATCATGGAAAGAAGCAGCTTCGAGAAGAATCCCATCGACTTTCTGGAAGCC
AAGGGCTACAAAGAAGTGAAAAAGGACCTGATCATCAAGCTGCCTAAGTACTCCCTGTTCGAGCTGGAAAACGGCCGGA
AGAGAATGCTGGCCTCTGCCGGCGAACTGCAGAAGGGAAACGAACTGGCCCTGCCCTCCAAATATGTGAACTTCCTGTA
CCTGGCCAGCCACTATGAGAAGCTGAAGGGCTCCCCCGAGGATAATGAGCAGAAACAGCTGTTTGTGGAACAGCACAAG
CACTACCTGGACGAGATCATCGAGCAGATCAGCGAGTTCTCCAAGAGAGTGATCCTGGCCGACGCTAATCTGGACAAAG
TGCTGTCCGCCTACAACAAGCACCGGGATAAGCCCATCAGAGAGCAGGCCGAGAATATCATCCACCTGTTTACCCTGAC
CAATCTGGGAGCCCCTGCCGCCTTCAAGTACTTTGACACCACCATCGACCGGAAGAGGTACACCAGCACCAAAGAGGTG
CTGGACGCCACCCTGATCCACCAGAGCATCACCGGCCTGTACGAGACACGGATCGACCTGTCTCAGCTGGGAGGCGAC
Fragment 7 (535 bp)
(SEQ ID NO: 13)
GGCCTGTACGAGACACGGATCGACCTGTCTCAGCTGGGAGGCGACAAAAGGCCGGCGGCCACGAAAAAGGCCGGCCAGG
CAAAAAAGAAAAAGTAAGAATTCCTAGAGCTCGCTGATCAGCCTCGACTGTGCCTTCTAGTTGCCAGCCATCTGTTGTT
TGCCCCTCCCCCGTGCCTTCCTTGACCCTGGAAGGTGCCACTCCCACTGTCCTTTCCTAATAAAATGAGGAAATTGCAT
CGCATTGTCTGAGTAGGTGTCATTCTATTCTGGGGGGTGGGGTGGGGCAGGACAGCAAGGGGGAGGATTGGGAAGAGAA
TAGCAGGCATGCTGGGGAGCGGCCGCAGGAACCCCTAGTGATGGAGTTGGCCACTCCCTCTCTGCGCGCTCGCTCGCTC
ACTGAGGCCGGGCGACCAAAGGTCGCCCGACGCCCGGGCTTTGCCCGGGCGGCCTCAGTGAGCGAGCGAGCGCGCAGCT
GCCTGCAGGGGCGCCTATCGAATTCCTGCAGCCCGGGGGATCCACTAGTTCTAGAGCGGCC

[0415] To reconstruct the CRISPR/Cas system described in Cong et al the above DNA fragments in addition to EcoRV linearised pBlueScript KS+ vector will be assembled using Gibson Assembly kit (NEB Cat No. E5510S). As an alternative approach, the 6006 bp fragment can be assembled by assembly PCR by mixing molar ratio of the individual DNA fragments together and using the DNA mixture as PCR template. The assembled PCR product can then be cloned directly into pBlueScript vector or a standard cloning vector system such as a TOPO TA cloning kit (Invitrogen).

### B: Reconstructing CRISPR/Cas Vector System (D10A Nickase)

[0416] The D10A nickase version of the CRISPR/Cas system can be conveniently reconstructed by assembling the above fragments where fragment 2 is replaced with fragment 2A which contains the D10A substitution (See sequence below).

Fragment 2A (852 bp)
(SEQ ID NO: 14)
ATGGACTATAAGGACCACGACGGAGACTACAAGGATCATGATATTGATTA
CAAAGACGATGACGATAAGATGGCCCCAAAGAAGAAGCGGAAGGTCGGTA
TCCACGGAGTCCCAGCAGCCGACAAGAAGTACAGCATCGGCCTGgccATC
GGCACCAACTCTGTGGGCTGGGCCGTGATCACCGACGAGTACAAGGTGCC
CAGCAAGAAATTCAAGGTGCTGGGCAACACCGACCGGCACAGCATCAAGA
AGAACCTGATCGGAGCCCTGCTGTTCGACAGCGGCGAAACAGCCGAGGCC
ACCCGGCTGAAGAGAACCGCCAGAAGAAGATACACCAGACGGAAGAACCG
GATCTGCTATCTGCAAGAGATCTTCAGCAACGAGATGGCCAAGGTGGACG
ACAGCTTCTTCCACAGACTGGAAGAGTCCTTCCTGGTGGAAGAGGATAAG
AAGCACGAGCGGCACCCCATCTTCGGCAACATCGTGGACGAGGTGGCCTA
CCACGAGAAGTACCCCACCATCTACCACCTGAGAAAGAAACTGGTGGACA
GCACCGACAAGGCCGACCTGCGGCTGATCTATCTGGCCCTGGCCCACATG
ATCAAGTTCCGGGGCCACTTCCTGATCGAGGGCGACCTGAACCCCGACAA
CAGCGACGTGGACAAGCTGTTCATCCAGCTGGTGCAGACCTACAACCAGC
TGTTCGAGGAAAACCCCATCAACGCCAGCGGCGTGGACGCCAAGGCCATC
CTGTCTGCCAGACTGAGCAAGAGCAGACGGCTGGAAAATCTGATCGCCCA
GCTGCCCGGCGAGAAGAAGAATGGCCTGTTCGGAAACCTGATTGCCCTGA
GC

[0417] The substituted aspartate to alanine is highlighted in bold and underlined.

### C: Target (Spacer) Sequence Cloning

[0418] The target spacer sequence can be cloned into the above CRISPR/Cas vector system via the BbsI restriction sites located upstream of the chimeric guided RNA sequence. The spacer sequence can be ordered as oligo pairs and annealed together with overhangs as shown below to allow direct cloning into BbsI linearised CRISPR/Cas vector using standard molecular biology protocols.

[0419] Sequence of an example oligo pair with spacer sequence:

(SEQ ID NO: 15)
5′-CACCGNNNNNNNNNNNNNNNNNNN-3′
(SEQ ID NO: 16)
3′-CNNNNNNNNNNNNNNNNNNNCAAA-5′

[0420] The 4 bp overhang sequence underlined is required to be included in the spacer oligos to facilitate cloning into the BbsI restriction site in the CRISPR/Cas vector. Using this approach, any spacer sequence can be conveniently cloned into the CRISPR/Cas vector.

### D: Reconstructing CRISPR/Cas System for One-Step Generation of Transgenic Animals

[0421] In order to reconstitute a CRISPR/Cas system for one-step generation of transgenic animal as described in Wang et al. (Wang H., Yang H., Shivalila C. S., Dawlaty M. M., Cheng A. W., Zhang F., Jaenisch R.: One-step generation of mice carrying mutations in multiple genes by CRISPR/Cas-mediated genome engineering, Cell, 2013, 153(4):910-918) where direct embryo injection is used, the above detailed CRISPR/Cas vector system needs to be modified to incorporate a T7 polymerase promoter to the Cas9 coding sequence. In addition, the gRNA needs to be removed and synthetised separately by annealing oligos or produced synthetically (See below for an example T7-spacer sequence fused to chimeric guided RNA sequence—T7-gRNA). Note, ideally the spacer sequence will be designed in a unique region of a given chromosome to minimise off-target effect and also the respective protospacer genomic sequence needs to have a PAM at the 3′-end.

### Example T7

### gRNA Sequence

(SEQ ID NO: 17)
TTAATACGACTCACTATAGGNNNNNNNNNNNNNNNNNNNNGTTTTAGAG
CTAGAAATAGCAAGTTAAAATAAGGCTAGTCCGTTATCAACTTGAAAAA
GTGGCACCGAGTCGGTGCTTTTTT

[0423] The underlined 20 bp of N's depicts the spacer sequence for a given target DNA.

[0424] To reconstruct the one-step CRISPR/Cas system, the above detailed DNA fragments (Fragments 2, 3, 4, 5, 6 & 7) can be assembled together where fragment 1A (containing 45 bp homology to pBlueScript KS+ vector 5′ to the EcoRV restriction site, human U6 promoter, BbsI restriction sites, chimeric guided RNA sequence and chicken b-actin promoter) is replaced with fragment 1, which only contains 45 bp homology to pBlueScript KS+ vector and the DNA sequence for T7 polymerase promoter with 45 bp homology to fragment 2. This will create the nuclease version of the CRISPR/Cas system for one-step generation of transgenic animals. To create the nickase version, fragment 2 can be replaced with fragment 2A as detailed above and then fragments 1, 2A, 3, 4, 5, 6 and 7 can be assembled together either by Gibson assembly or by assembly PCR.

Fragment 1 (111 bp)
(SEQ ID NO: 18)
GGTACCGGGCCCCCCCTCGAGGTCGACGGTATCGATAAGCTTGATAATAC
GACTCACTATAGGGAGAATGGACTATAAGGACCACGACGGAGACTACAAG
GATCATGATATT

### E: Preparation of Oligo/DNA Fragments for HDR-Mediated Repair

[0425] DNA oligos ranging from 15 bp and upwards in excess of >125 bp will be synthetised through Sigma Custom Oligo synthesis Service. The oligos can contain any sequence such as a defined mutation, introduced restriction sites or a sequence of interest including recombination recognition sequence such as loxP or derivatives thereof, Frt and derivatives thereof or PiggyBac LTR or any other transposon elements or regulatory elements including enhancers, promoter sequence, reporter gene, selection markets and tags. The oligo design will incorporate DNA homology to the region where Cas9 mediates double-stranded DNA break or DNA nick. The size of the homology will range from a few base pairs (2-5 bp) to upwards and in excess of 80 bp. Larger DNA fragments (>100 bp ranging up to several kilobases) will be prepared either synthetically (GeneArt) or by PCR. The DNA fragment will be synthetised either with or without flanked NLS or only with a single NLS and either with or without a promoter (e.g. T7 polymerase promoter). The DNA can be prepared as a single stranded DNA fragment using either the capture biotinylated target DNA sequence method (Invitrogen: Dynabeads M-270 Streptavidin) or any other standard and established single stranded DNA preparation methodology. The single stranded DNA can be prepared for microinjection by IVT as described above and the mRNA co-injected with Cas9 mRNA and gRNA. The DNA fragment can also be co-injected as a double stranded DNA fragment. The DNA fragment will be flanked by DNA homology to the site where Cas9 mediates double-stranded DNA break or DNA nick. The DNA homology can range from a few base pairs (2-5 bp) and up to or in excess of several kilobases. The DNA fragment can be used to introduce any endogenous or exogenous DNA.

[0426] HDR-mediated repair can also be done in ES cells following CRISPR/Cas-mediated DNA cleavage. The above mentioned donor oligo or DNA fragment can be co-transfected into ES cells along with the CRISPR/Cas expression vector.

F: Production of Cas9 mRNA and gRNA

[0427] Vector containing the T7 polymerase promoter with the coding region of humanised Cas9 will be PCR amplified using oligos Cas9-F and Cas9-R. The T7-Cas9 PCR product can be gel extracted and the DNA purified using Qiagen gel extraction kit. The purified T7-Cas9 DNA will be used for in vitro transcription (IVT) using mMESSAGE mMACHINE T7 Ultra Kit (Life Technologies Cat No. AM1345). The vector containing the T7-gRNA can be PCR amplified using oligos gRNA-F and gRNA-R and once again the PCR products gel purified. IVT of the T7-gRNA will be carried out using MEGAshortscript T7 Kit (Life Technologies Cat No. AM1354) and the gRNA purified using MEGAclear Kit (Life Technologies Cat No. AM1908) and eluted in RNase-free water.

| (SEQ ID NO: 19) | |
|---|---|
| Cas9-17: | TTAATACGACTCACTATAGG |
| (SEQ ID NO: 20) | |
| Cas9-R: | GCGAGCTCTAGGAATTCTTAC |
| (SEQ ID NO: 21) | |
| gRNA-F: | TTAATACGACTCACTATAGG |
| (SEQ ID NO: 22) | |
| gRNA-R: | AAAAAAGCACCGACTCGGTGCCAC |

### Example 5B

### One Step Generation of Transgenic Animals

### A: ES Cell Transfection Procedure

[0428] Mouse embryonic stem cells AB2.1 and derivatives of this line will be used for transfecting the mammalian codon optimised Cas9 and sgRNA from a single expression vector or from separate vectors if desired. AB2.1 ES cells will be cultured on a PSNL76/7/4 MEF feeder layer in M-15: Knockout DMEM (Gibco, no pyruvate, high glucose, 15% FBS, 1×GPS, 1×BME) with standard ES cell culturing techniques. Transfection of CRISPR/Cas expression vector along with the optional addition of a donor oligo or DNA fragment will be done by electroporation using the Amaxa 4D-Nucleofector® Protocol (Lonza). A plasmid expressing PGK-Puro will also be optionally co-transfected to promote transfection efficiency.

[0429] In one method, after transfection ES cells will be plated back onto feeder plates and Puromycin (2 μg/ml) will be added 72 hours post transfection for 7 days after which colonies will be picked and genotyped by PCR. Positive colonies will be further cultured and expanded on feeder layer and selection markers where necessary will be excised using a PiggyBac transposon system. This will be done by electroporation of ES cells with a plasmid containing HyPbase using the Amaxa 4D-Nucleofector® Protocol (Lonza). The ES cell will be plated back onto feeder plates. ES cells will be passaged 2-3 days post transfection and after a further 2-3 days the ES cells will be plated out at different cells densities (1:10, 1:20, 1:100 and 1:300) and FIAU (2 μg/ml) selection will be added 24 hours after replating. Colonies will be picked and analysed by PCR genotyping after 7-10 days on selection media. Positive clones will be further cultured and expanded on feeder layer and sent for zygote (blastocyst) microinjection.

[0430] In an alternative method, 8 hours prior to transfection ES cells are seeded at a density of 0.5×106 cells using antibiotic free M-15 Knockout DMEM (Gibco, no pyruvate, high glucose, 15% FBS, 1×L-Glutamine, 1×BME) onto 6 w feeder plates. Transient transfection is performed using Lipofectamine LTX Reagent with PLUS™ Reagent (Invitrogen™) by standard protocol. After incubation time transfection reagents are transferred to feeder plates (cultured in antibiotic free media), media (M-15) will not be changed on these plates for at least 24 hours post transfection. 48 hours post transfection ES cells are trypsinized into a single cell suspension and a cell count is carried out and cells are plated out at different cell densities ranging for 100-5000 cells per 10 cm feeder plate. 24 hours after replating Puro selection at 2 μg/ml (Puromycin dihydrochloride from Streptomyces alboniger powder, P8833 Sigma) is applied to the cells for 4 days, after which cells are cultured again in M-15. Colonies are picked 10-13 days post transfection.

### Method 5C: Microinjection of Mouse Zygotes—Method 1

### Materials and Reagents:

[0431] M2 (Sigma M7167)
[0432] Embryo Max KSOM (Speciality media MR-020P-F)
[0433] Hyaluronidase (Sigma H4272)
[0434] Mineral Oil (Sigma, M-8410)

### Possible Donor Strains:

[0435] S3F/S3F;KF3/KF3
[0436] S3F/S3F;K4/K4
[0437] S7F/S7F
[0438] K5F/K5F

### Preparation of Zygotes and Microinjection:

[0439] The protocol is as described in: A. Nagy Et al. Manipulating the Mouse Embryo 3rd Edition. Chapter 7, Protocols 7-1, 7-6, 7-10, 7-11. Cold Spring Harbor Laboratory Press.

[0440] In brief:
[0441] 1. Zygotes are harvested from E0.5 dpc (day post-coitum) superovulated female mice.
[0442] 2. The zygotes are incubated in hyaluronidase to disperse cumulus cells.
[0443] 3. Zygotes are collected and transferred to several drops of M2 medium to rinse off the hyaluronidase solution and debris. Zygotes are placed into KSOM Media and incubated at 37° C., 5% CO₂ until required.
[0444] 4. Zygote quality is assessed and zygotes with normal morphology are selected for injection, these are placed in KSOM media and incubated at 37° C., 5% CO₂ until required.

### Microinjection Set Up:

[0445] Injection procedures are performed on a Nikon Eclipse Ti inverted microscope with Eppendorf micromanipulators and an Eppendorf femtojet injection system. A slide is prepared by adding a large drop ˜200 microlitres of M2 into the centre.

### Microinjection:

[0446] Place an appropriate number of zygotes onto the slide. Examine the zygotes and select only those with normal morphology (2 distinct pronuclei are visible). Whilst holding a zygote with a male pronucleus closest to the injection pipette, carefully push the injection pipette through the zona pellucida into the pronucleus, apply injection pressure, the pronucleus should visibly swell, remove the injection pipette quickly. The injected zygote can be placed down while the rest are injected.

[0447] At the end of the injection session all viable injected zygotes should be placed into prepared dishes containing drops of KSOM and incubated until ready to surgically implant. They are incubated for 2-3 hours before surgically implanting into pseudo pregnant females. Pups will be born 21 days later.

### Method 5C: Microinjection of Mouse Zygotes—Method 2

### Materials and Reagents

[0448] PMSG
[0449] hCG
[0450] M2 (Sigma M7167)
[0451] Embryo Max KSOM (Specialty media MR-020P-F)
[0452] Mineral Oil (Sigma, M-8410)
[0453] Hyluronidase (Sigma H 4272)
[0454] 35 mm Falcon Petri dishes (Fisher 08-757-100A)
[0455] Sharp scissors
[0456] Sharp watchmakers forceps

### Preparation of Oocytes:

[0457] 1. Day 0: Give PMSG (5 I.U.) to the females by I. P, injection.
[0458] 2. Day 2: Give hCG (5 I.U.) to the females 48 Hours later by I. P, injection. Mate the females to stud males.
[0459] 3. Day 3: Check plugs, sacrifice plugged female mice by CO2 asphyxiation or cervical dislocation at 0.5 dpc at 8.00 am.
[0460] 4. Dissect open the abdomen, locate the ovary and fat pad, dissect out the oviduct leaving the ovary and fat, trimming the uterine horn to ˜1 cm, place into a 35 mm Petri dish containing M2 at room temp.
[0461] 5. Place one ovary at a time into a dish containing hyaluronidase solution in M2 (˜0.3 mg/ml) at room temp. View through a stereoscope at 20× or 40× magnification.
[0462] 6. Use one pair of forceps to grasp the oviduct and hold it on the bottom of the dish. Use the second pair of forceps or a 26 g needle to tear the oviduct close to where the zygotes are located (the ampulla), releasing the clutch of cumulus cells.
[0463] 7. The zygotes should be left in the hyaluronidase for a few minutes only, after which time the zygotes may become damaged. If necessary pipette them up and down a few times to help the release of the zygotes from the cumulus cells.
[0464] 8. Use a mouth pipette to pick up the zygotes and transfer them to a fresh dish of M2, then transfer through several drops of M2 to rinse off the hyaluronidase, cumulus cells and debris. Sort through the zygotes removing any obviously bad ones (fragmented, misshapen, not fertilized), and place the good ones (two polar bodies should be visible and any with polar bodies) into equilibrated drops of KSOM+AA at 37° C. and 5% CO₂, keep incubated until needed. Place about 50 eggs per drop.

### Pronuclear Microinjection

[0465] 1. Microinjection set up: Injection procedures are performed on a Nikon Eclipse Ti inverted microscope with Eppendorf micromanipulators. Prepare a 60 mm petri dish to place injected zygotes into. Pipette four-six 40 μl drops of KSOM+AA, cover with oil and place in a 5% CO₂ incubator to equilibrate. Prepare a cavity slide by making a large (˜200 μl) drop of M2 media onto the center of the well, add a small drop of medium on the left side of the slide, for the holding pipette.
[0466] 2. Microinjection: Ensure that the pressurized injector has been switched on and is ready to use. Place an appropriate number of zygotes onto the slide, do not add more zygotes than can be injected within 20-30 mins. Place the holding pipette into the drop of M2 on the left of the slide; it will fill using capillary action, once filled to about the shoulder attach to the manipulator. Carefully examine the zygotes, making sure that two pronuclei are visible and morphology is good, discard any that appear abnormal. To test if the injection needle is open, place the tip near to but not touching a zygote in the same focal plane. Apply pressure using the pressurized system, if the zygote moves the needle is open, if it doesn't the needle is closed. In this case apply pressure using the “clear” feature, if the tip is still not open manually break the tip. Carefully “knock” the tip on the holding pipette and repeat the above test, make sure the tip does not become too large, if this happens replace the needle and start again. Place the tip of the holding pipette next to a zygote and suck it onto the end of the pipette by applying negative pressure. Focus the microscope to locate the pronuclei, the zygote should be positioned in such a way that allows injection into the zygote without hitting the pronuclei, preferably with a gap between the zona pellucida and the oolema. Bring the tip of the injection needle into the same focal plane as the zona pellucida. Bring the injection pipette to the same y-axis position as the zona pellucida, adjust the height of the needle so the tip appears completely sharp, without changing the focus. This ensures the needle will target the zygote exactly. Push the injection pipette through the zona pellucida, through the cytoplasm towards the back of the zygote. The needle will create a “bubble” through the oolema, this needs to be broken, you will see it snap back at which point remove the needle quickly, you will see the cytoplasm moving to indicate RNA is flowing from the needle. Cytoplasmic granules flowing out of the oocytes after removal of the injection pipette is a clear sign that the zygote will soon lyse. In this case, or if nuclear/cytoplasmic components are sticking to the injection pipette, the oocytes should be discarded after injection. If the zygote appears to be intact and successfully injected, sort this into a good group. Pick a new zygote for injection. The same injection pipette can be used as long as it continues to inject successfully. Switch to a new injection pipette if (a) you cannot see any cytoplasmic distortion (b) zygotes are lysing one after the other, (c) the tip of the pipette becomes visibly “dirty” or nuclear contents stick to the pipette. Once all the zygotes have been injected, remove them and place them into the equilibrated KSOM+AA and place them into the incubator at 37° C. overnight. Only transfer those zygotes that have survived injection, and cultured to the 2 cell stage. Leave any lysed ones, and zygotes that have not developed.
[0467] 3. Count the total number injected and record the numbers transferred per recipient

### Results

[0468] To demonstrate the efficient of the one-step generation of transgenic mice, we used our T7-Cas9 nuclease vector to generate mRNA via in vitro transcription detailed above. mRNA from the guide RNA was also produced using in vitro transcription described above. Before injecting the mRNA mixture into the cytoplasm, oocytes were prepared from female mice using the protocol detailed above. An mRNA mixture containing 100 ng/ul Cas9 nuclease mRNA and 50 ng/ul guide mRNA was injected by microinjection into the cytoplasm as detailed above. The microinjection is done at the single-cell stage. Zygotes that survived the injection were cultured to 2 cell stage, which were then transferred to recipient mice.

[0469] In total, 107 zygotes were injected from which 49 survived and went to 2 cell stage. These were then transferred to two recipient female mice. This resulted in 19 pups from 2 litters. Litter 1 yielded 3 males and 6 females. Litter 2 yielded 4 males and 6 females. The pups were ear clipped 3 weeks after birth and DNA was extracted. PCR was carried out using oligos flanking the gRNA to detect possible indels (FIG. 14).

[0470] PCR amplifying around the guide RNA and separating out the PCR products on an agarose gel highlighted at least one mouse contained a large indel in the form of a deletion, whereas other mice appeared to have smaller indels judging by the sharpness of the PCR product on the gel. As an initial crude analysis, all the PCR products were sent for sequencing and those marked with an asterix (7 mice in total. FIG. 14) yielded mix sequences around the gRNA further confirming they contain indels. To confirm this, the PCR products from these 7 mice together with the PCR product from another mouse which did not yield a mix sequence (PCR product from lane 19, FIG. 14) were individually cloned into a general cloning vector. From each individual cloning, 28 clones were picked and analysed by sequencing. The sequencing confirmed all 7 mice contain indels and the mice that did not contain any mix sequence contained no indels. The sequencing data is summarised in FIG. 15.

[0471] The sequencing data confirmed all of the mice analysed contained indels. It also suggests that using our zygote injection protocol detailed above and our method for preparing mRNA for Cas9 and guide RNA, Cas9 works efficiently at an early stage and until the point where cells starts to divide beyond the 2 cell stage judging by the fact that in all of the mice analysed, no more than 3 types of indels were identified. Out of the 7 mice containing indels, 3 of them had no detectable WT sequence. The female mouse (KMKY6.1j) that did not show mix sequence from the initial sequencing analysis indeed did not contain any indels so it validates our initial sequencing analysis of the PCR products.

[0472] The male mouse (KMKY5.1c) that showed no WT sequence was used as a mating partner for the two female mice (KMKY5.1e & KMKY6.1e) that showed no WT sequence too. The resulting pups from the two matings yielded 14 pups in total from the first litter. Following similar sequencing analysis whereby PCR products amplified from the region around the guide RNA were cloned individual and several clones were then analysed for the presence of indels. For each mouse, 24 clones were analysed by sequencing. The sequencing data from all 14 pups confirmed only two indel sequences reflecting the two alleles arising from the parental male and female mouse. This data unequivocally demonstrates that our one-step genome editing protocol works very efficiently at an early stage and not beyond the 2 cell stage thus avoiding complex mosaic indel formation. Using our established protocol, we can carry out define deletions directly in zygotes or carry out define deletion followed by insertion to expedite the process of generating transgenic mice to homozygosity in record time.

### Example 6

### Single Cas9 Cas9 Expression in ES Cells

[0473] Reference is made to FIG. 6B.
[0474] 1. A landing pad consisting of a PiggyBac transposon element with the following features will be targeted into mouse ES cells (e.g., 129-derived ES cells, such as AB2.1 ES cells; Baylor College of Medicine, Texas, USA) and selected for on G418. The PiggyBac transposon element will contain neomycin resistance gene flanked by loxP and lox2272. It will also have a geneless PGK promoter. In this example, the landing pad will be targeted into the introgenic region of Rosa26 gene located on chromosome 6, but it could be targeted elsewhere. Targeting this landing pad in the Rosa26 gene will provide a universal ES cell line for precisely inserting any desired DNA fragment including DNA fragments containing Cas9, mutant Cas9 or any other gene of interest via RMCE with high efficiency. Targeting Rosa26 is beneficial since the targeted construct will be inserted as a single copy (unlike random integration elsewhere) and is unlikely to produce an unwanted phenotypic effect.

[0475] Note. This landing pad can be inserted into any gene in any chromosome or indeed in any eukaryotic or mammalian cell line, e.g., a human, insect, plant, yeast, mouse, rat, rabbit, rodent, pig, dog, cat, fish, chicken or bird cell line, followed by generation of the respective transgenic organism expressing Cas9.

### Rosa 26 Locus

[0476] Ubiquitous expression of transgene in mouse embryonic stem cell can be achieved by gene targeting to the ROSA26 locus (also known as: gene trap ROSA 26 or Gt(ROSA)26) by homologous recombination (Ref. (a) and (b) below). The genomic coordinates for mouse C57BL/6J Rosa26 gene based on Ensemble release 73—September 2013 is: Chromosome 6: 113,067,428-113,077,333; reverse strand.

[0477] The Rosa26 locus can also be used to as a recipient location to knock-in a transgene. In our example we have use the Rosa26 locus to knock-in the landing pad vector by targeting through homologous recombination into the intronic region located between exons 2 and 3 of mouse strain 129-derived embryonic stem cells using approx. 3.1 kb homology arms. The homology arms were retrieved by recombineering from a BAC Clone generated from mouse strain 129. The sequence of the Rosa26 homology arms used for targeting is given below.

Sequence of Rosa26 5′ homology arm
(SEQ ID NO: 23)
CACATTTGGTCCTGCTTGAACATTGCCATGGCTCTTAAAGTCTTAATTAAGAATATTAATTGTGTAATTATTGTTTTT
CCTCCTTTAGATCATTCCTTGAGGACAGGACAGTGCTTGTTTAAGGCTATATTTCTGCTGTCTGAGCAGCAACAGGTC
TTCGAGATCAACATGATGTTCATAATCCCAAGATGTTGCCATTTATGTTCTCAGAAGCAAGCAGAGGCATGATGGTCA
GTGACAGTAATGTCACTGTGTTAAATGTTGCTATGCAGTTTGGATTTTTCTAATGTAGTGTAGGTAGAACATATGTGT
TCTGTATGAATTAAACTCTTAAGTTACACCTTGTATAATCCATGCAATGTGTATGCAATTACCATTTTAAGTATTGTA
GCTTTCTTTGTATGTGAGGATAAAGGTGTTTGTCATAAAATGTTTTGAACATTTCCCCAAAGTTCCAAATTATAAAAC
CACAACGTTAGAACTTATTTATGAACAATGGTTGTAGTTTCATGCTTTTAAAATGCTTAATTATTCAATTAACACCGT
TTGTGTTATAATATATATAAAACTGACATGTAGAAGTGTTTGTCCAGAACATTTCTTAAATGTATACTGTCTTTAGAG
AGTTTAATATAGCATGTCTTTTGCAACATACTAACTTTTGTGTTGGTGCGAGCAATATTGTGTAGTCATTTTGAAAAG
GAGTCATTTCAATGAGTGTCAGATTGTTTTGAATGTTATTGAACATTTTAAATGCAGACTTGTTCGTGTTTTAGAAAG
CAAAACTGTCAGAAGCTTTGAACTAGAAATTAAAAAGCTGAAGTATTTCAGAAGGGAAATAAGCTACTTGCTGTATTA
GTTGAAGGAAAGTGTAATAGCTTAGAAAATTTAAAACCATATAGTTGTCATTGCTGAATATCTGGCAGATGAAAAGAA
ATACTCAGTGGTTCTTTTGAGCAATATAACAGCTTGTTATATTAAAAATTTTCCCCACAGATATAAACTCTAATCTAT
AACTCATAAATGTTACAAATGGATGAAGCTTACAAATGTGGCTTGACTTGTCACTGTGCTTGTTTTAGTTATGTGAAA
GTTTGGCAATAAACCTATGTCCTAAATAGTCAAACTGTGGAATGACTTTTTAATCTATTGGTTTGTCTAGAACAGTTA
TGTTGCCATTTGCCCTAATGGTGAAAGAAAAAGTGGGGAGTGCCTTGGCACTGTTCATTTGTGGTGTGAACCAAAGAG
GGGGGCATGCACTTACACTTCAAACATCCTTTTGAAAGACTGACAAGTTTGGGTCTTCACAGTTGGAATTGGGCATCC
CTTTTGTCAGGGAGGGAGGGAGGGAGGGAGGCTGGCTTGTTATGCTGACAAGTGTGATTAAATTCAAACTTTGAGGTA
AGTTGGAGGAACTTGTACATTGTTAGGAGTGTGACAATTTGGACTCTTAATGATTTGGTCATACAAAATGAACCTAGA
CCAACTTCTGGAAGATGTATATAATAACTCCATGTTACATTGATTTCACCTGACTAATACTTATCCCTTATCAATTAA
ATACAGAAGATGCCAGCCATCTGGGCCTTTTAACCCAGAAATTTAGTTTCAAACTCCTAGGTTAGTGTTCTCACTGAG
CTACATCCTGATCTAGTCCTGAAAATAGGACCACCATCACCCCCAAAAAAATCTCAAATAAGATTTATGCTAGTGTTT
CAAAATTTTAGGAATAGGTAAGATTAGAAAGTTTTAAATTTTGAGAAATGGCTTCTCTAGAAAGATGTACATAGTGAA
CACTGAATGGCTCCTAAAGAGCCTAGAAAACTGGTACTGAGCACACAGGACTGAGAGGTCTTTCTTGAAAAGCATGTA
TTGCTTTACGTGGGTCACAGAAGGCAGGCAGGAAGAACTTGGGCTGAAACTGGTGTCTTAAGTGGCTAACATCTTCAC
AACTGATGAGCAAGAACTTTATCCTGATGCAAAAACCATCCAAACAAACTAAGTGAAAGGTGGCAATGGATCCCAGGC
TGCTCTAGAGGAGGACTTGACTTCTCATCCCATCACCCACACCAGATAGCTCATAGACTGCCAATTAACACCAGCTTC
TAGCCTCCACAGGCACCTGCACTGGTACACATAATTTCACACAAACACAGTAAGAAGCCTTCCACCTGGCATGGTATT
GCTTATCTTTAGTTCCCAACACTTGGGAGGCAGAGGCCAGCCAGGGCTATGTGACAAAAACCTTGTCTAGAGGAGAAA
CTTCATAGCTTATTTCCTATTCACGTAACCAGGTTAGCAAAATTTACCAGCCAGAGATGAAGCTAACAGTGTCCACTA
TATTTGTAGTGTTTTAAGTCAATTTTTTAAATATACTTAATAGAATTAAAGCTATGGTGAACCAAGTACAAACCTGGT
GTATTAACTTGAGAACTTAGCATAAAAAGTAGTTCATTTGTTCAGTAAATATTAAATGCTTACTGGCAAAGATTATGT
CAGGAACTTGGTAAATGGTGATGAAACAATCATAGTTGTACATCTTGGTTCTGTGATCACCTTGGTTTGAGGTAAAAG
TGGTTCCTTTGATCAAGGATGGAATTTTAAGTTTATATTCAATCAATAATGTATTATTTTGTGATTGCAAAATTGCCT
ATCTAGGGTATAAAACCTTTAAAAATTTCATAATACCAGTTCATTCTCCAGTTACTAATTCCAAAAAGCCACTGACTA
TGGTGCCAATGTGGATTCTGTTCTCAAAGGAAGGATTGTCTGTGCCCTTTATTCTAATAGAAACATCACACTGAAAAT
CTAAGCTGAAAGAAGCCAGACTTTCCTAAATAAATAACTTTCCATAAAGCTCAAACAAGGATTACTTTTAGGAGGCAC
TGTTAAGGAACTGATAAGTAATGAGGTTACTTATATAATGATAGTCCCACAAGACTATCTGAGGAAAAATCAGTACAA
CTCGAAAACAGAACAACCAGCTAGGCAGGAATAACAGGGCTCCCAAGTCAGGAGGTCTATCCAACACCCTTTTCTGTT
GAGGGCCCCAGACCTACATATTGTATACAAACAGGGAGGTGGGTGATTTTAACTCTCCTGAGGTAC
Sequence of Rosa26 3′ homoloty arm
(SEQ ID NO: 24)
CTTGGTAAATCTTTGTCCTGAGTAAGCAGTACAGTGTACAGTTTACATTTTCATTTAAAGATACATTAGCTCCCTCTA
CCCCCTAAGACTGACAGGCACTTTGGGGGTGGGGAGGGCTTTGGAAAATAACGCTTCCATACACTAAAAGAGAAATTT
CTTTAATTAGGCTTGTTGGTTCCATACATCTACTGGTGTTTCTACTACTTAGTAATATTATAATAGTCACACAAGCAT
CTTTGCTCTGTTTAGGTTGATATATTTATTTTAAGGCAGATGATAAAACTGTAGATCTTAAGGGATGCTTCTGCTTCT
GAGATGATACAAAGAATTTAGACCATAAAACAGTAGGTTGCACAAGCAATAGAATATGGCCTAAAGTGTTCTGACACT
TAGAAGCCAAGCAGTGTAGGCTTCTTAAGAAATACCATTACAATCACCTTGCTAGAAATCAAGCATTCTGGAGTGGTC
AAGCAGTGTAACCTGTACTGTAAGTTACTTTTCTGCTATTTTTCTCCCAAAGCAAGTTCTTTATGCTGATATTTCCAG
TGTTAGGAACTACAAATATTAATAAGTTGTCTTCACTCTTTTCTTTACCAAGGAGGGTCTCTTCCTTCATCTTGATCT
GAAGGATGAACAAAGGCTTGAGCAGTGCGCTTTAGAAGATAAACTGCAGCATGAAGGCCCCCGATGTTCACCCAGACT
ACATGGACCTTTCGCCACACATGTCCCATTCCAGATAAGGCCTGGCACACACAAAAAACATAAGTCATTAGGCTACCA
GTCTGATTCTAAAACAACCTAAAATCTTCCCACTTAAATGCTATGGGTGGTGGGTTGGAAAGTTGACTCAGAAAATCA
CTTGCTGTTTTTAGAGAGGATCTGGGTTCAGTTTCTGATACATTGTGGCTTACAACTATAACTCCAGTTCTAGGGGGT
CCATCCAACATCCTCTTCTGTTGAGGGCACCAAATAAATGTATTGTGTACAAACAGGGAGGTGAGTGATTTAACTCTC
GTGTATAGTACCTTGGTAAAACATTTCTTGTCCTGAGTAAGCAGTACAGCTCTGCCTGTCCCTGGTCTACAGACACGG
CTCATTTCCCGAAGGCAAGCTGGATAGAGATTCCAATTTCTCTTCTTGGATCCCATCCTATAAAAGAAGGTCAAGTTT
AATCTATTGCAAAAGGTAAATAGGTAGTTTCTTACATGAGACAAGAACAAATCTTAGGTGTGAAGCAGTCATCTTTTA
CAGGCCAGAGCCTCTATTCTATGCCAATGAAGGAAACTGTTAGTCCAGTGTTATAGAGTTAGTCCAGTGTATAGTTTT
CTATCAGAACACTTTTTTTTTAAACAACTGCAACTTAGCTTATTGAAGACAAACCACGAGTAGAAATCTGTCCAAGAA
GCAAGTGCTTCTCAGCCTACAATGTGGAATAGGACCATGTAATGGTACAGTGAGTGAAATGAATTATGGCATGTTTTT
CTGACTGAGAAGACAGTACAATAAAAGGTAAACTCATGGTATTTATTTAAAAAGAATCCAATTTCTACCTTTTTCCAA
ATGGCATATCTGTTACAATAATATCCACAGAAGCAGTTCTCAGTGGGAGGTTGCAGATATCCCACTGAACAGCATCAA
TGGGCAAACCCCAGGTTGTTTTTCTGTGGAGACAAAGGTAAGATATTTCAATATATTTTCCCAAGCTAATGAGATGGC
TCAGCAAATAATGGTACTGGCCATTAAGTCTCATGACCTGAGCTTGATCCTCAGGGACCATGTGGTACAAGGAGAGAC
CTAAATCCTTCAGTTGGACTTCAATCTTCTACCCTCATGTCCACACACAAATAAATACAATAAAAAACATTCTGCAGT
CTGAATTTCTAAAGGTTGTTTTTCTAAAAAGAAATGTTAAAGTAACATAGGAAGAAATATGTCCATAACTGAAATACA
AGTTTTTTAAATGGTTAAGACTGGTTTTCAAAGGATGTATGGTTAAGAAAATACCAGGGAAAATGAGCTTACATGTAA
AAAAGTGTCTAAAAGGCCAGAGAAATGACCCAGCTGGCAAAGGTGTCTGCCCTAAGCCAGACAAAAGGAATTTGATTC
ACAGGAAGAAGAGACCCAACTCTCACTAGTTATCCTCTGACTTCCACACCATGACACAGCTCCATGGCACTCTCAGGC
CCCCACACATATACAGATATAAACAGAAACCTAATCCACCAGCCTTCAGAAGCAAAGCAATTGGAGGATTTAAACAGG
CCATGGCTACTAATAGAGATAACTGGTAGTTTAAAAGTTATGGTAATGACTTTCATGCTTCTTTCAACTCATATTGTT
CTAAATAATTAATTTGGTTTTTCAAGGCAGGGTTTCTCTGTGTAGTTCTGGCTGTCCTGGAACTCACTCTGTAGACCA
GGCTGGCCTTGAACTCAGATCCATCTGCCTCTGGAATAAGGGCACGTGCGTGCCTTTTCTACATAACAAAACCTATAC
TATAACAAAACCTATACCATACTGTACCGTTTTGGGAAAAGACAAAAAATAATGAACAAAAAAGGAGAAATAACATTC
CAATAAAGTATGGAAATGGTAGTTAAATTAATTACAAATGTTTTTCAGTAAATTAGATGTGACTTCTCATACTGTTCA
TTTGGCTATAATGATACCACAAAGCACTGGGGGTGAATAATAATTCCAAGTCAGTAGGGAGAGAGACTTGAAAAGATG
CAATGCAATCATTGAAGTTAAACTTACCCATCTTTAATCTGGCTCTTAGTCAATAGAGATGAGATGTTATTTGCTGCT
CTGTTCACTGCCAGTGGGTTATTGTCCCCAGCAATATGGTAACAGTGAGACCACTCAGTAGCCCCCTATGAGACAGGA
GTGTTGGTTAAACATGCCACAAGAGAAAAGGGAAAAGTCACTATGGCCAACTCTCAGTAACATGGCAATCCGTGCCAT
TCATTTCCTTGCCAGAAATGTCTTCCCTGTTCTTCTGCCTACTGAACTTTCACCCACTAGAAATGTGGCTCCAATGTC
ATCCACTATGACATCAATGTCAGCGCTAGAAGCACTTTGCACACCTCTGTTGCTGACTTAG

### REFERENCE

[0478] a) Pablo Perez-Pinera, David G. Ousterout, Matthew T. Brown and Charles A. Gersbach (2012) Gene targeting to the ROSA26 locus directed by engineered zinc finger nucleases. Nucleic Acids Research, 2012, Vol. 40, No. 8 3741-3752
[0479] b) Peter Hohenstein, Joan Slight, Derya Deniz Ozdemir, Sally F Burn, Rachel Berry and Nicholas D Hastie (2008) High-efficiency Rosa26 knock-in vector construction for Cre-regulated overexpression and RNAi. PathoGenetics 2008, 1:3
[0480] 2. A recombinase mediated cassette exchange (RMCE)-enabled vector containing a promoterless puromycin-delta-tk with in-frame fusion of T2A at the C-terminus following by either Cas9 or mutant Cas9 nucleotide sequence and a series of unique restriction sites flanked by loxP and lox2272 will allow for the direct targeting of this vector into the landing pad by Cre-mediated RMCE. As is known, T2A allows ribosomal skipping during translation. The insertion of the coding sequence of T2A between two genes results in two products (one gene, one transcript but two proteins expressed, in this case the Cas9 and selection marker). ES clones containing the correctly inserted DNA fragment can be directly selected on puromycin. This approach also advantageously ensures single copy expression of Cas9 as suppose to a random integration or transient expression approach. Insertion of the RMCE enabled vector into the desired locus containing the landing pad can be selected directly as the PGK promoter in the landing pad will drive the transcription of the promoterless Puro-Delta-Tk and Cas9. Since the Puro-delta-Tk is in the same transcriptional unit as Cas9, ES clones selected on puromycin will ensure expression of Cas9.
[0481] 3. The above strategy allows for three separate approaches to express the sgRNA designed for disrupting (mutation through indel formation, deletion or deletion followed by insertion) gene of interest.
   [0482] a. The above ES cell line containing Cas9 can be used for generating transgenic mice with either constitutively expressed Cas9 or modified for inducible Cas9 expression or indeed tissue specific Cas9 expression for example expression of Cas9 at an embryo stage using Nanog-, PouSfl- or SoxB promoter-specific Cas9 expression. Such derived mouse line expressing Cas9 can be used for genome editing in a streamline fashion whereby in vitro transcribed sgRNA can be easily injected into embryos obtained from such transgenic mice. This will enhance the efficiency of generating mouse lines with the desired homozygous genotype and thus will dramatically reduce the number of animals required.
   [0483] b. sgRNA can be transfected directly into the ES cells expressing Cas9 and thus avoids the requirement for cloning into the RMCE enabled vector single or multiple sgRNA. This approach will allow multiple sgRNA to be inserted into the ES cells simultaneously very rapidly.
   [0484] c. Multiple sgRNA can be cloned directly into the multiple cloning site of the RMCE enabled vector (ie, using a plurality of different restriction endonuclease sites) to allow single copy expression of the guide-RNA. This approach may be useful for limiting off-target effects particularly relevant for those genes with high sequence homology within the genome.
[0485] 4. ES cells expressing Cas9 and sgRNA can be selected for directly on medium containing puromycin. Selection on puromycin for 4-6 days will allow for the desired location to be mutated or disrupted and the advantage of manipulating ES cells is that individual clones can be analysed by PCR followed by sequencing for the desired mutation. Only correctly mutated ES cell clones can be processed further whereby inserted DNA element introduced through insertion of the landing pad and the subsequent insertion of the RMCE vector can be completely removed leaving the ES cell devoid of any alteration other than the intended mutation induced by the action of Cas9 and the sgRNA. This can be done through transiently expressing PBase transposon followed by selection on FIAU. Removal of the constitutively expressed Cas9 with only the minimal length of time required to induce mutation in the presence of sgRNA will reduce or eliminate the possibility of Cas9 inducing unwanted mutations.
[0486] 5. ES Clones containing the desired mutation can be injected into blastocyst to generate transgenic mice.

TABLE 1
PAM conservation in reeats and leaders for various CRISPR types
(reproduced from Short motif sequences determine the targets of the
prokaryotic CRISPR defence system F. J. M. Molica, C. Diez-Villaserior,
J. Garcia-Martinez, C. Almendros Microbiology(2009), 155, 733-740)

| | Genomes* | PAM | CRISPR Consensus^{†} | Leaders^{‡} |
|---|---|---|---|---|
| Group 1 | Mth | NGG | ATTTCAATCCCATTTTGGTCTGATTTTAAC | AGGGCGGATT |
| | | | | ATGGCCAATT |
| | Lmo | WGG | ATTTACATTTCAHAATAAGTARYTAAAAC | CCACTAACTT |
| | | | | CCGCTCTATT |
| Group 2 | Eco | CWT | CGGTTTATCCCCGCTGGCGCGGGGAACWC | TCTAAACATA |
| | | | | TCTAAAAGTA |
| | Pae | CTT | CGGTTCATCCCCACRCMYGTGGGGAACAC | ACTTACCGTA |
| | | | | CCTTACCGTA |
| Group 3 | Spy | GAA | ATTTCAATCCACTCACCCATGAAGGGTGAGAC | TGCGCCAAAT |
| | Xan | GAA | GTTTCAATCCACGCGCCCGTGAGGRCGCGAC | CCCCCCTTAG |
| | | | | GCCGCCAGCA |
| Group 4 | She | GG | TTTCTAAGCCGCCTGTGCGGCGGTGAAC | AATAGCTTAT |
| | | | | TGTAGAATAA |
| | Pae | GG | TTTCTTAGCTGCCTATACGGCAGTGAAC | TAGCTCCGAA |
| | | | | TAGACCAAAA |
| | Ype | GG | TTTCTAAGCTGCCTGTGCGGCAGTGAAC | GTAAGATAAT |
| Group 7 | Sso | NGG | CTTTCAATTCTATAAGAGATTATC | TGAGGGTTTA |
| | Mse | NGG | CTTTCAACTCTATAGGAGATTAAC | TGATACCTTT |
| | | | | TGAAACTTTT |
| | | | | TGACACTCTT |
| Group 10 | Str | NGG | GTTTTAGAGCTATGCTGTTTTGAATGGTCCCAAAAC | CTCGTAGACT |
| | | | | CTCGTAGAAA |
| | Lis | NGG | GTTTTAGAGCTATGTTATTTTGAATGCTAMCAAAAC | CTCGCAGAAT |
| | | | | CTCGTAGAAT |

*Genomes are abbreviated according to the denominations of the species or genera
carrying the corresponding CRISPR arrays: Mth, M. thermautotrophicus; Lmo,
L. monocytogenes; Eco, E. coli; Pae, P. aeruginosa; Spy, S. pyogenes; Xan, Xanthomonas
spp.; She, Shewanella spp,; Ype, Y. pestis, Sso, S. solfataricus; Mse, M. sedula; Str,
Streptococcus spp.; Lis, Listeria spp.
^{†}Sequences matching the PAM are underlined.
^{‡}Representative CRISPR array proximal Leader sequences. Nucleotides matching the PAM are
underlined.

[0487] SEQ ID NOs for the sequences in Table 1 are set out in the table below.

| | | | | SEQ | | SEQ |
|---|---|---|---|---|---|---|
| dfd | Genomes* | PAM | CRISPR Consens^{†} | ID NO. | Leaders^{‡} | ID NO. |
| Group 1 | Mth | NGG | ATTTCAATCCCATTTTGGTCTGATTTTAAC | 25 | AGGGCGGATT | 38 |
| | | | | | ATGGCCAATT | 39 |
| | Lmo | WGG | ATTTACATTTCAHAATAAGTARYTAAAAC | 26 | CCACTAACTT | 40 |
| | | | | | CCGCTCTATT | 41 |
| Group 2 | Eco | CWT | CGGTTTATCCCCGCTGGCGCGGGGAACWC | 27 | TCTAAACATA | 42 |
| | | | | | TCTAAAAGTA | 43 |
| | Pae | CTT | CGGTTCATCCCCACRCMYGTGGGGAACAC | 28 | ACTTACCGTA | 44 |
| | | | | | CCTTACCGTA | 45 |
| Group 3 | Spy | GAA | ATTTCAATCCACTCACCCATGAAGGGTGAGAC | 29 | TGCGCCAAAT | 46 |
| | Xan | GAA | GTTTCAATCCACGCGCCCGTGAGGRCGCGAC | 30 | CCCCCCTTAG | 47 |
| | | | | | GCCGCCAGCA | 48 |
| Group 4 | She | GG | TTTCTAAGCCGCCTGTGCGGCGGTGAAC | 31 | AATAGCTTAT | 49 |
| | | | | | TGTAGAATAA | 50 |
| | Pae | GG | TTTCTTAGCTGCCTATACGGCAGTGAAC | 32 | TAGCTCCGAA | 51 |
| | | | | | TAGACCAAAA | 52 |
| | Ype | GG | TTTCTAAGCTGCCTGTGCGGCAGTGAAC | 33 | GTAAGATAAT | 53 |
| Group 7 | Sso | NGG | CTTTCAATTCTATAAGAGATTATC | 34 | TGAGGGTTTA | 54 |
| | Mse | NGG | CTTTCAACTCTATAGGAGATTAAC | 35 | TGATACCTTT | 55 |
| | | | | | TGAAACTTTT | 56 |
| | | | | | TGACACTCTT | 57 |
| Group 10 | Str | NGG | GTTTTAGAGCTATGCTGTTTTGAATGGTCCCAAAAC | 36 | CTCGTAGACT | 58 |
| | | | | | CTCGTAGAAA | 59 |
| | Lis | NGG | GTTTTAGAGCTATGTTATTTTGAATGCTAMCAAAAC | 37 | CTCGCAGAAT | 60 |
| | | | | | CTCGTAGAAT | 61 |

TABLE 2
CRISPR-Associated Endonucleases
[Gene ID numbers refer to genes in the NCBI Gene Database
as at September 2013; all sequence information relating to
the gene IDs below is incorporated herein by reference for
possible use in the present invention]

1. Plav_0099
CRISPR-associated endonuclease Csn1 family
protein [Parvibaculum lavamentivorans DS-1]
Other Aliases: Plav_0099
Genomic context: Chromosome
Annotation: NC_009719.1 (105795 . . . 108908, complement)
ID: 5454634
SEQ ID NO: 62
2. FTN_0757
membrane protein [Francisella novicida U112]
Other Aliases: FTN_0757
Genomic context: Chromosome
Annotation: NC_008601.1 (810052 . . . 814941)
ID: 4548251
SEQ ID NO: 63
3. Cj1523c
CRISPR-associated protein [Campylobacter jejuni subsp. jejuni
NCTC 11168 = ATCC 700819]
Other Aliases: Cj1523c
Genomic context: Chromosome
Annotation: NC_002163.1 (1456880 . . . 1459834, complement)
ID: 905809
SEQ ID NO: 64
4. mcrA
restriction endonuclease [Bifidobacterium longum DJO10A]
Other Aliases: BLD_1902
Genomic context: Chromosome
Annotation: NC_010816.1 (2257993 . . . 2261556)
ID: 6362834
SEQ ID NO: 65
5. MGA_0519
Csn1 family CRISPR-associated protein [Mycoplasma gallisepticum
str. R(low)]
Other Aliases: MGA_0519
Genomic context: Chromosome
Annotation: NC_004829.2 (919248 . . . 923060)
ID: 1089911
SEQ ID NO: 66
6. Emin_0243
CRISPR-associated endonuclease Csn1 family
protein [Elusimicrobium minutum Pei191]
Other Aliases: Emin_0243
Genomic context: Chromosome
Annotation: NC_010644.1 (261119 . . . 264706)
ID: 6263045
SEQ ID NO: 67
7. FTW_1427
CRISPR-associated large protein [Francisella tularensis subsp.
tularensis WY96-3418]
Other Aliases: FTW_1427
Genomic context: Chromosome
Annotation: NC_009257.1 (1332426 . . . 1335803, complement)
ID: 4958852
SEQ ID NO: 68
8. SMA_1444
CRISPR-associated protein, Csn1
family [Streptococcus macedonicus ACA-DC 198]
Other Aliases: SMA_1444
Annotation: NC_016749.1 (1418337 . . . 1421729, complement)
ID: 11601419
SEQ ID NO: 69
9. SSUST3_1318
CRISPR-associated protein, Csn1 family [Streptococcus suis ST3]
Other Aliases: SSUST3_1318
Genomic context: Chromosome
Annotation: NC_015433.1 (1323872 . . . 1327240, complement)
ID: 10491484
SEQ ID NO: 70
10. cas5
CRISPR-associated protein, Csn1
family [Streptococcus gallolyticus UCN34]
Other Aliases: GALLO_1439
Genomic context: Chromosome
Annotation: NC_013798.1 (1511433 . . . 1514825, complement)
ID: 8776949
SEQ ID NO: 71
11. GALLO_1446
CRISPR-associated protein [Streptococcus gallolyticus UCN34]
Other Aliases: GALLO_1446
Genomic context: Chromosome
Annotation: NC_013798.1 (1518984 . . . 1523110, complement)
ID: 8776185
SEQ ID NO: 72
12. csn1
CRISPR-associated endonuclease Csn1 [Bifidobacterium dentium
Bd1]
Other Aliases: BDP_1254
Genomic context: Chromosome
Annotation: NC_013714.1 (1400576 . . . 1403992, complement)
ID: 8692053
SEQ ID NO: 73
13. NMO_0348
putative CRISPR-associated protein [Neisseria meningitides
alpha14]
Other Aliases: NMO_0348
Genomic context: Chromosome
Annotation: NC_013016.1 (369547 . . . 372795, complement)
ID: 8221228
SEQ ID NO: 74
14. csn1
CRISPR-Associated Protein Csn1 [Streptococcus equi subsp.
zooepidemicus MGCS10565]
Other Aliases: Sez_1330
Genomic context: Chromosome
Annotation: NC_011134.1 (1369339 . . . 1373385, complement)
ID: 6762114
SEQ ID NO: 75
15. csn1
CRISPR-associated endonuclease Csn1 family
protein [Streptococcus gordonii str. Challis substr. CH1]
Other Aliases: SGO_1381
Genomic context: Chromosome
Annotation: NC_009785.1 (1426750 . . . 1430160, complement)
ID: 5599802
SEQ ID NO: 76
16. M28_Spy0748
cytoplasmic protein [Streptococcus pyogenes MGAS6180]
Other Aliases: M28_Spy0748
Genomic context: Chromosome
Annotation: NC_007296.1 (771231 . . . 775337)
ID: 3573516
SEQ ID NO: 77
17. SGGBAA2069_c14690
CRISPR-associated protein [Streptococcus gallolyticus subsp.
gallolyticus ATCC BAA-2069]
Other Aliases: SGGBAA2069_c14690
Genomic context: Chromosome
Annotation: NC_015215.1 (1520905 . . . 1525017, complement)
ID: 10295470
SEQ ID NO: 78
18. SAR116_2544
CRISPR-associated protein, Csn1
family [Candidatus Puniceispirillum marinum IMCC1322]
Other Aliases: SAR116_2544
Genomic context: Chromosome
Annotation: NC_014010.1 (2748992 . . . 2752099)
ID: 8962895
SEQ ID NO: 79
19. TDE0327
CRISPR-associated Cas5e [Treponema denticola ATCC 35405]
Other Aliases: TDE0327
Genomic context: Chromosome
Annotation: NC_002967.9 (361021 . . . 365208)
ID: 2741543
SEQ ID NO: 80
20. csn1
CRISPR-associated protein [Streptococcus pasteurianus
ATCC 43144]
Other Aliases: SGPB_1342
Genomic context: Chromosome
Annotation: NC_015600.1 (1400035 . . . 1403427, complement)
ID: 10753339
SEQ ID NO: 81
21. cas9
CRISPR-associated protein [Corynebacterium ulcerans BR-AD22]
Other Aliases: CULC22_00031
Genomic context: Chromosome
Annotation: NC_015683.1 (30419 . . . 33112, complement)
ID: 10842578
SEQ ID NO: 82
22. MGAS2096_Spy0843
putative cytoplasmic protein [Streptococcus pyogenes MGAS2096]
Other Aliases: MGAS2096_Spy0843
Genomic context: Chromosome
Annotation: NC_008023.1 (813084 . . . 817190)
ID: 4066021
SEQ ID NO: 83
23. MGAS9429_Spy0885
cytoplasmic protein [Streptococcus pyogenes MGAS9429]
Other Aliases: MGAS9429_Spy0885
Genomic context: Chromosome
Annotation: NC_008021.1 (852508 . . . 856614)
ID: 4061575
SEQ ID NO: 84
24. AZL_009000
CRISPR-associated protein, Csn1 family [Azospirillum sp. B510]
Other Aliases: AZL_009000
Genomic context: Chromosome
Annotation: NC_013854.1 (1019522 . . . 1023028, complement)
ID: 8789261
SEQ ID NO: 85
25. EUBREC_1713
contains RuvC-like nuclease and HNH-nuclease
domains [Eubacterium rectale ATCC 33656]
Other Aliases: EUBREC_1713
Other Designations: CRISPR-system related protein
Genomic context: Chromosome
Annotation: NC_012781.1 (1591112 . . . 1594456)
ID: 7963668
SEQ ID NO: 86
26. Alide2_0194
CRISPR-associated protein, Csn1
family [Alicycliphilus denitrificans K601]
Other Aliases: Alide2_0194
Genomic context: Chromosome
Annotation: NC_015422.1 (218107 . . . 221196)
ID: 10481210
SEQ ID NO: 87
27. Alide_0205
crispr-associated protein, csn1
family [Alicycliphilus denitrificans BC]
Other Aliases: Alide_0205
Genomic context: Chromosome
Annotation: NC_014910.1 (228371 . . . 231460)
ID: 10102228
SEQ ID NO: 88
28. STER_1477
CRISPR-system-like protein [Streptococcus thermophilus LMD-9]
Other Aliases: STER_1477
Genomic context: Chromosome
Annotation: NC_008532.1 (1379975 . . . 1384141, complement)
ID: 4437923
SEQ ID NO: 89
29. STER_0709
CRISPR-system-like protein [Streptococcus thermophilus LMD-9]
Other Aliases: STER_0709
Genomic context: Chromosome
Annotation: NC_008532.1 (643235 . . . 646600)
ID: 4437391
SEQ ID NO: 90
30. cas9
CRISPR-associated protein [Corynebacterium diphtheriae 241]
Other Aliases: CD241_2102
Genomic context: Chromosome
Annotation: NC_016782.1 (2245769 . . . 2248399)
ID: 11674395
SEQ ID NO: 91
31. cas3
CRISPR-associated endonuclease [Corynebacterium diphtheriae 241]
Other Aliases: CD241_0034
Genomic context: Chromosome
Annotation: NC_016782.1 (35063 . . . 38317)
ID: 11672999
SEQ ID NO: 92
32. Corgl_1738
CRISPR-associated protein, Csn1 family [Coriobacterium glomerans
PW2]
Other Aliases: Corgl_1738
Genomic context: Chromosome
Annotation: NC_015389.1 (2036091 . . . 2040245)
ID: 10439994
SEQ ID NO: 93
33. Fluta_3147
CRISPR-associated protein, Csn1 family [Fluviicola taffensis
DSM 16823]
Other Aliases: Fluta_3147
Genomic context: Chromosome
Annotation: NC_015321.1 (3610221 . . . 3614597, complement)
ID: 10398516
SEQ ID NO: 94
34. Acav_0267
CRISPR-associated protein, Csn1 family [Acidovorax avenae subsp.
avenae ATCC 19860]
Other Aliases: Acav_0267
Genomic context: Chromosome
Annotation: NC_015138.1 (295839 . . . 298976)
ID: 10305168
SEQ ID NO: 95
35. NAL212_2952
CRISPR-associated protein, Csn1 family [Nitrosomonas sp. AL212]
Other Aliases: NAL212_2952
Genomic context: Chromosome
Annotation: NC_015222.1 (2941806 . . . 2944940, complement)
ID: 10299493
SEQ ID NO: 96
36. SpiBuddy_2181
CRISPR-associated protein, Csn1 family [Sphaerochaeta globosa
str. Buddy]
Other Aliases: SpiBuddy_2181
Genomic context: Chromosome
Annotation: NC_015152.1 (2367952 . . . 2371491, complement)
ID: 10292274
SEQ ID NO: 97
37. Tmz1t_2411
HNH endonuclease [Thauera sp. MZ1T]
Other Aliases: Tmz1t_2411
Genomic context: Plasmid pTha01
Annotation: NC_011667.1 (75253 . . . 76200, complement)
ID: 7094333
SEQ ID NO: 98
38. Gdia_0342
Csn1 family CRISPR-associated
protein [Gluconacetobacter diazotrophicus PAI 5]
Other Aliases: Gdia_0342
Genomic context: Chromosome
Annotation: NC_011365.1 (382737 . . . 385748)
ID: 6973736
SEQ ID NO: 99
39. JJD26997_1875
CRISPR-associated Cas5e family protein [Campylobacter jejuni
subsp. doylei 269.97]
Other Aliases: JJD26997_1875
Genomic context: Chromosome
Annotation: NC_009707.1 (1656109 . . . 1659063, complement)
ID: 5389688
SEQ ID NO: 100
40. Asuc_0376
CRISPR-associated endonuclease Csn1 family
protein [Actinobacillus succinogenes 130Z]
Other Aliases: Asuc_0376
Genomic context: Chromosome
Annotation: NC_009655.1 (431928 . . . 435116)
ID: 5348478
SEQ ID NO: 101
41. Veis_1230
CRISPR-associated endonuclease Csn1 family
protein [Verminephrobacter eiseniae EF01-2]
Other Aliases: Veis_1230
Genomic context: Chromosome
Annotation: NC_008786.1 (1365979 . . . 1369185)
ID: 4695198
SEQ ID NO: 102
42. MGAS10270_Spy0886
putative cytoplasmic protein [Streptococcus pyogenes MGAS10270]
Other Aliases: MGAS10270_Spy0886
Genomic context: Chromosome
Annotation: NC_008022.1 (844446 . . . 848552)
ID: 4063984
SEQ ID NO: 103
43. gbs0911
hypothetical protein [Streptococcus agalactiae NEM316]
Other Aliases: gbs0911
Genomic context: Chromosome
Annotation: NC_004368.1 (945801 . . . 949946)
ID: 1029893
SEQ ID NO: 104
44. NMA0631
hypothetical protein [Neisseria meningitidis Z2491]
Other Aliases: NMA0631
Genomic context: Chromosome
Annotation: NC_003116.1 (610868 . . . 614116, complement)
ID: 906626
SEQ ID NO: 105
45. Ccan_14650
hypothetical protein [Capnocytophaga canimorsus Cc5]
Other Aliases: Ccan_14650
Genomic context: Chromosome
Annotation: NC_015846.1 (1579873 . . . 1584165, complement)
ID: 10980451
SEQ ID NO: 106
46. lpp0160
hypothetical protein [Legionella pneumophila str. Paris]
Other Aliases: lpp0160
Genomic context: Chromosome
Annotation: NC_006368.1 (183831 . . . 187949)
ID: 3118625
SEQ ID NO: 107
47. Cbei_2080
hypothetical protein [Clostridium beijerinckii NCIMB 8052]
Other Aliases: Cbei_2080
Genomic context: Chromosome
Annotation: NC_009617.1 (2422056 . . . 2423096)
ID: 5296367
SEQ ID NO: 108
48. MMOB0330
hypothetical protein [Mycoplasma mobile 163K]
Other Aliases: MMOB0330
Genomic context: Chromosome
Annotation: NC_006908.1 (45652 . . . 49362, complement)
ID: 2807677
SEQ ID NO: 109
49. MGF_5203
Csn1 family CRISPR-associated protein [Mycoplasma gallisepticum
str. F]
Other Aliases: MGF_5203
Genomic context: Chromosome
Annotation: NC_017503.1 (888602 . . . 892411)
ID: 12397088
SEQ ID NO: 110
50. MGAH_0519
Csn1 family CRISPR-associated protein [Mycoplasma gallisepticum
str. R(high)]
Other Aliases: MGAH_0519
Genomic context: Chromosome
Annotation: NC_017502.1 (918476 . . . 922288)
ID: 12395725
SEQ ID NO: 111
51. Smon_1063
CRISPR-associated protein, Csn1
family [Streptobacillus moniliformis DSM 12112]
Other Aliases: Smon_1063
Genomic context: Chromosome
Annotation: NC_013515.1 (1159048 . . . 1162827, complement)
ID: 8600791
SEQ ID NO: 112
52. Spy49_0823
hypothetical protein [Streptococcus pyogenes NZ131]
Other Aliases: Spy49_0823
Genomic context: Chromosome
Annotation: NC_011375.1 (821210 . . . 825316)
ID: 6985827
SEQ ID NO: 113
53. C8J_1425
hypothetical protein [Campylobacter jejuni subsp. jejuni 81116]
Other Aliases: C8J_1425
Genomic context: Chromosome
Annotation: NC_009839.1 (1442672 . . . 1445626, complement)
ID: 5618449
SEQ ID NO: 114
54. FTF0584
hypothetical protein [Francisella tularensis subsp. tularensis
FSC198]
Other Aliases: FTF0584
Genomic context: Chromosome
Annotation: NC_008245.1 (601115 . . . 604486)
ID: 4200457
SEQ ID NO: 115
55. FTT_0584
hypothetical protein [Francisella tularensis subsp. tularensis
SCHU S4]
Other Aliases: FTT_0584
Genomic context: Chromosome
Annotation: NC_006570.2 (601162 . . . 604533)
ID: 3191177
SEQ ID NO: 116
56. csn1
CRISPR-associated protein [Streptococcus dysgalactiae subsp.
equisimilis RE378]
Other Aliases: GGS_1116
Annotation: NC_018712.1 (1169559 . . . 1173674, complement)
ID: 13799322
SEQ ID NO: 117
57. SMUGS5_06270
CRISPR-associated protein csn1 [Streptococcus mutans GS-5]
Other Aliases: SMUGS5_06270
Genomic context: Chromosome
Annotation: NC_018089.1 (1320641 . . . 1324678, complement)
ID: 13299050
SEQ ID NO: 118
58. Y1U_C1412
Csn1 [Streptococcus thermophilus MN-ZLW-002]
Other Aliases: Y1U_C1412
Genomic context: Chromosome
Annotation: NC_017927.1 (1376653 . . . 1380819, complement)
ID: 12977193
SEQ ID NO: 119
59. Y1U_C0633
CRISPR-system-like protein [Streptococcus thermophilus
MN-ZLW-002]
Other Aliases: Y1U_C0633
Genomic context: Chromosome
Annotation: NC_017927.1 (624274 . . . 627639)
ID: 12975630
SEQ ID NO: 120
60. SALIVA_0715
CRISPR-associated endonuclease, Csn1
family [Streptococcus salivarius JIM8777]
Other Aliases: SALIVA_0715
Annotation: NC_017595.1 (708034 . . . 711417)
ID: 12910728
SEQ ID NO: 121
61. csn1
CRISPR-associated protein csn1 [Streptococcus mutans LJ23]
Other Aliases: SMULJ23_0701
Annotation: NC_017768.1 (751695 . . . 755732)
ID: 12898085
SEQ ID NO: 122
62. RIA_1455
CRISPR-associated protein, SAG0894 [Riemerella anatipestifer
RA-GD]
Other Aliases: RIA_1455
Genomic context: Chromosome
Annotation: NC_017569.1 (1443996 . . . 1448198)
ID: 12613647
SEQ ID NO: 123
63. STND_0658
CRISPR-associated endonuclease, Csn1
family [Streptococcus thermophilus ND03]
Other Aliases: STND_0658
Genomic context: Chromosome
Annotation: NC_017563.1 (633621 . . . 636986)
ID: 12590813
SEQ ID NO: 124
64. RA0C_1034
putative BCR [Riemerella anatipestifer ATCC 11845 = DSM 15868]
Other Aliases: RA0C_1034
Genomic context: Chromosome
Annotation: NC_017045.1 (1023494 . . . 1026931, complement)
ID: 11996006
SEQ ID NO: 125
65. Sinf_1255
CRISPR-associated protein, SAG0894
family [Streptococcus infantarius subsp. infantarius CJ18]
Other Aliases: Sinf_1255
Genomic context: Chromosome
Annotation: NC_016826.1 (1276484 . . . 1280611, complement)
ID: 11877786
SEQ ID NO: 126
66. Nitsa_1472
CRISPR-associated protein, csn1
family [Nitratifractor salsuginis DSM 16511]
Other Aliases: Nitsa_1472
Genomic context: Chromosome
Annotation: NC_014935.1 (1477331 . . . 1480729)
ID: 10148263
SEQ ID NO: 127
67. NLA_17660
hypothetical protein [Neisseria lactamica 020-06]
Other Aliases: NLA_17660
Genomic context: Chromosome
Annotation: NC_014752.1 (1890078 . . . 1893326)
ID: 10006697
SEQ ID NO: 128
68. SmuNN2025_0694
hypothetical protein [Streptococcus mutans NN2025]
Other Aliases: SmuNN2025_0694
Genomic context: Chromosome
Annotation: NC_013928.1 (737258 . . . 741295)
ID: 8834629
SEQ ID NO: 129
69. SDEG_1231
hypothetical protein [Streptococcus dysgalactiae subsp.
equisimilis GGS_124]
Other Aliases: SDEG_1231
Chromosome: 1
Annotation: Chromosome 1NC_012891.1 (1176755 . . . 1180870,
complement)
ID: 8111553
SEQ ID NO: 130
70. NMCC_0397
hypothetical protein [Neisseria meningitidis 053442]
Other Aliases: NMCC_0397
Genomic context: Chromosome
Annotation: NC_010120.1 (402733 . . . 405981, complement)
ID: 5796426
SEQ ID NO: 131
71. SAK_1017
hypothetical protein [Streptococcus agalactiae A909]
Other Aliases: SAK_1017
Genomic context: Chromosome
Annotation: NC_007432.1 (980303 . . . 984415)
ID: 3686185
SEQ ID NO: 132
72. M5005_Spy_0769
hypothetical protein [Streptococcus pyogenes MGAS5005]
Other Aliases: M5005_Spy_0769
Genomic context: Chromosome
Annotation: NC_007297.1 (773340 . . . 777446)
ID: 3572134
SEQ ID NO: 133
73. MS53_0582
hypothetical protein [Mycoplasma synoviae 53]
Other Aliases: MS53_0582
Genomic context: Chromosome
Annotation: NC_007294.1 (684155 . . . 688099)
ID: 3564051
SEQ ID NO: 134
74. DIP0036
hypothetical protein [Corynebacterium diphtheriae NCTC 13129]
Other Aliases: DIP0036
Genomic context: Chromosome
Annotation: NC_002935.2 (34478 . . . 37732)
ID: 2650188
SEQ ID NO: 135
75. WS1613
hypothetical protein [Wolinella succinogenes DSM 1740]
Other Aliases: WS1613
Genomic context: Chromosome
Annotation: NC_005090.1 (1525628 . . . 1529857)
ID: 2553552
SEQ ID NO: 136
76. PM1127
hypothetical protein [Pasteurella multocida subsp. multocida
str. Pm70]
Other Aliases: PM1127
Genomic context: Chromosome
Annotation: NC_002663.1 (1324015 . . . 1327185, complement)
ID: 1244474
SEQ ID NO: 137
77. SPs1176
hypothetical protein [Streptococcus pyogenes SSI-1]
Other Aliases: SPs1176
Genomic context: Chromosome
Annotation: NC_004606.1 (1149610 . . . 1153716, complement)
ID: 1065374
SEQ ID NO: 138
78. SMU_1405c
hypothetical protein [Streptococcus mutans UA159]
Other Aliases: SMU_1405c, SMU.1405c
Genomic context: Chromosome
Annotation: NC_004350.2 (1330942 . . . 1334979, complement)
ID: 1028661
SEQ ID NO: 139
79. lin2744
hypothetical protein [Listeria innocua Clip11262]
Other Aliases: lin2744
Genomic context: Chromosome
Annotation: NC_003212.1 (2770707 . . . 2774711, complement)
ID: 1131597
SEQ ID NO: 140
80. csn1B
CRISPR-associated protein [Streptococcus gallolyticus subsp.
gallolyticus ATCC 43143]
Other Aliases: SGGB_1441
Annotation: NC_017576.1 (1489111 . . . 1493226, complement)
ID: 12630646
SEQ ID NO: 141
81. csn1A
CRISPR-associated protein [Streptococcus gallolyticus subsp.
gallolyticus ATCC 43143]
Other Aliases: SGGB_1431
Annotation: NC_017576.1 (1480439 . . . 1483831, complement)
ID: 12630636
SEQ ID NO: 142
82. cas9
CRISPR-associated protein [Corynebacterium ulcerans 809]
Other Aliases: CULC809_00033
Genomic context: Chromosome
Annotation: NC_017317.1 (30370 . . . 33063, complement)
ID: 12286148
SEQ ID NO: 143
83. GDI_2123
hypothetical protein [Gluconacetobacter diazotrophicus PAI 5]
Other Aliases: GDI_2123
Genomic context: Chromosome
Annotation: NC_010125.1 (2177083 . . . 2180235)
ID: 5792482
SEQ ID NO: 144
84. Nham_4054
hypothetical protein [Nitrobacter hamburgensis X14]
Other Aliases: Nham_4054
Genomic context: Plasmid 1
Annotation: NC_007959.1 (13284 . . . 16784, complement)
ID: 4025380
SEQ ID NO: 145
85. str0657
hypothetical protein [Streptococcus thermophilus CNRZ1066]
Other Aliases: str0657
Genomic context: Chromosome
Annotation: NC_006449.1 (619189 . . . 622575)
ID: 3165636
SEQ ID NO: 146
86. stu0657
hypothetical protein [Streptococcus thermophilus LMG 18311]
Other Aliases: stu0657
Genomic context: Chromosome
Annotation: NC_006448.1 (624007 . . . 627375)
ID: 3165000
SEQ ID NO: 147
87. SpyM3_0677
hypothetical protein [Streptococcus pyogenes MGAS315]
Other Aliases: SpyM3_0677
Genomic context: Chromosome
Annotation: NC_004070.1 (743040 . . . 747146)
ID: 1008991
SEQ ID NO: 148
88. HFMG06CAA_5227
Csn1 family CRISPR-associated
protein [Mycoplasma gallisepticum CA06_2006.052-5-2P]
Other Aliases: HFMG06CAA_5227
Genomic context: Chromosome
Annotation: NC_018412.1 (895338 . . . 899147)
ID: 13464859
SEQ ID NO: 149
89. HFMG01WIA_5025
Csn1 family CRISPR-associated
protein [Mycoplasma gallisepticum WI01_2001.043-13-2P]
Other Aliases: HFMG01WIA_5025
Genomic context: Chromosome
Annotation: NC_018410.1 (857648 . . . 861457)
ID: 13463863
SEQ ID NO: 150
90. HFMG01NYA_5169
Csn1 family CRISPR-associated
protein [Mycoplasma gallisepticum NY01_2001.047-5-1P]
Other Aliases: HFMG01NYA_5169
Genomic context: Chromosome
Annotation: NC_018409.1 (883511 . . . 887185)
ID: 13462600
SEQ ID NO: 151
91. HFMG96NCA_5295
Csn1 family CRISPR-associated
protein [Mycoplasma gallisepticum NC96_1596-4-2P]
Other Aliases: HFMG96NCA_5295
Genomic context: Chromosome
Annotation: NC_018408.1 (904664 . . . 908473)
ID: 13462279
SEQ ID NO: 152
92. HFMG95NCA_5107
Csn1 family CRISPR-associated
protein [Mycoplasma gallisepticum NC95_13295-2-2P]
Other Aliases: HFMG95NCA_5107
Genomic context: Chromosome
Annotation: NC_018407.1 (871783 . . . 875592)
ID: 13461469
SEQ ID NO: 153
93. MGAS10750_Spy0921
hypothetical protein [Streptococcus pyogenes MGAS10750]
Other Aliases: MGAS10750_Spy0921
Genomic context: Chromosome
Annotation: NC_008024.1 (875719 . . . 879834)
ID: 4066656
SEQ ID NO: 154
94. XAC3262
hypothetical protein [Xanthomonas axonopodis pv. citri
str. 306]
Other Aliases: XAC3262
Genomic context: Chromosome
Annotation: NC_003919.1 (3842310 . . . 3842765)
ID: 1157333
SEQ ID NO: 155
95. SSUST1_1305
CRISPR-system-like protein [Streptococcus suis ST1]
Other Aliases: SSUST1_1305
Genomic context: Chromosome
Annotation: NC_017950.1 (1293105 . . . 1297250, complement)
ID: 13017849
SEQ ID NO: 156
96. SSUD9_1467
CRISPR-associated protein, Csn1 family [Streptococcus suis D9]
Other Aliases: SSUD9_1467
Genomic context: Chromosome
Annotation: NC_017620.1 (1456318 . . . 1459686, complement)
ID: 12718289
SEQ ID NO: 157
97. BBta_3952
hypothetical protein [Bradyrhizobium sp. BTAi1]
Other Aliases: BBta_3952
Genomic context: Chromosome
Annotation: NC_009485.1 (4149455 . . . 4152649, complement)
ID: 5151538
SEQ ID NO: 158
98. CIY_03670
CRISPR-associated protein, Csn1
family [Butyrivibrio fibrisolvens 16/4]
Other Aliases: CIY_03670
Annotation: NC_021031.1 (309663 . . . 311960, complement)
ID: 15213189
SEQ ID NO: 159
99. A11Q_912
CRISPR-associated protein, Csn1
family [Bdellovibrio exovorus JSS]
Other Aliases: A11Q_912
Genomic context: Chromosome
Annotation: NC_020813.1 (904781 . . . 907864, complement)
ID: 14861475
SEQ ID NO: 160
100. MCYN0850
Csn1 family CRISPR-associated protein [Mycoplasma cynos C142]
Other Aliases: MCYN_0850
Annotation: NC_019949.1 (951497 . . . 955216, complement)
ID: 14356531
SEQ ID NO: 161
101. SaSA20_0769
CRISPR-associated protein [Streptococcus agalactiae SA20-06]
Other Aliases: SaSA20_0769
Genomic context: Chromosome
Annotation: NC_019048.1 (803597 . . . 807709)
ID: 13908026
SEQ ID NO: 162
102. csn1
CRISPR-associated protein, Csn1
family [Streptococcus pyogenes A20]
Other Aliases: A20_0810
Genomic context: Chromosome
Annotation: NC_018936.1 (772038 . . . 776144)
ID: 13864445
SEQ ID NO: 163
103. P700755_000291
CRISPR-associated protein Cas9/Csn1, subtype
II [Psychroflexus torquis ATCC 700755]
Other Aliases: P700755_000291
Genomic context: Chromosome
Annotation: NC_018721.1 (312899 . . . 317428)
ID: 13804571
SEQ ID NO: 164
104. A911_07335
CRISPR-associated protein [Campylobacter jejuni subsp.
jejuni PT14]
Other Aliases: A911_07335
Genomic context: Chromosome
Annotation: NC_018709.2 (1450217 . . . 1453180, complement)
ID: 13791138
SEQ ID NO: 165
105. ASU2_02495
CRISPR-associated endonuclease Csn1 family
protein [Actinobacillus suis H91-0380]
Other Aliases: ASU2_02495
Genomic context: Chromosome
Annotation: NC_018690.1 (552318 . . . 555482)
ID: 13751600
SEQ ID NO: 166
106. csn1
CRISPR-associated protein [Listeria monocytogenes SLCC2540]
Other Aliases: LMOSLCC2540_2635
Annotation: NC_018586.1 (2700744 . . . 2704748, complement)
ID: 13647248
SEQ ID NO: 167
107. csn1
CRISPR-associated protein [Listeria monocytogenes SLCC5850]
Other Aliases: LMOSLCC5850_2605
Annotation: NC_018592.1 (2646023 . . . 2650027, complement)
ID: 13626042
SEQ ID NO: 168
108. csn1
CRISPR-associated protein [Listeria monocytogenes serotype 7
str. SLCC2482]
Other Aliases: LMOSLCC2482_2606
Annotation: NC_018591.1 (2665393 . . . 2669397, complement)
ID: 13605045
SEQ ID NO: 169
109. csn1
CRISPR-associated protein [Listeria monocytogenes SLCC2755]
Other Aliases: LMOSLCC2755_2607
Annotation: NC_018587.1 (2694850 . . . 2698854, complement)
ID: 13599053
SEQ ID NO: 170
110. BN148_1523c
CRISPR-associated protein [Campylobacter jejuni subsp. jejuni
NCTC 11168-BN148]
Other Aliases: BN148_1523c
Annotation: NC_018521.1 (1456880 . . . 1459834, complement)
ID: 13530688
SEQ ID NO: 171
111. Belba_3201
CRISPR-associated protein Cas9/Csn1, subtype
II/NMEMI [Belliella baltica DSM 15883]
Other Aliases: Belba_3201
Genomic context: Chromosome
Annotation: NC_018010.1 (3445311 . . . 3449369, complement)
ID: 13056967
SEQ ID NO: 172
112. FN3523_1121
membrane protein [Francisella cf. novicida 3523]
Other Aliases: FN3523_1121
Genomic context: Chromosome
Annotation: NC_017449.1 (1129528 . . . 1134468, complement)
ID: 12924881
SEQ ID NO: 173
113. cas9
CRISPR-associated protein Cas9/Csn1, subtype
II/NMEMI [Prevotella intermedia 17]
Other Aliases: PIN17_A0201
Chromosome: II
Annotation: Chromosome IINC_017861.1 (240722 . . . 244864)
ID: 12849954
SEQ ID NO: 174
114. csn1
CRISPR-associated protein, Csn1
family [Streptococcus thermophilus JIM 8232]
Other Aliases: STH8232_0853
Annotation: NC_017581.1 (706443 . . . 709808)
ID: 12637306
SEQ ID NO: 175
115. LMOG_01918
CRISPR-associated protein [Listeria monocytogenes J0161]
Other Aliases: LMOG_01918
Genomic context: Chromosome
Annotation: NC_017545.1 (2735374 . . . 2739378, complement)
ID: 12557915
SEQ ID NO: 176
116. LMRG_02138
CRISPR-associated protein [Listeria monocytogenes 10403S]
Other Aliases: LMRG_02138
Genomic context: Chromosome
Annotation: NC_017544.1 (2641981 . . . 2645985, complement)
ID: 12554876
SEQ ID NO: 177
117. CJSA_1443
putative CRISPR-associated protein [Campylobacter jejuni subsp.
jejuni IA3902]
Other Aliases: CJSA_1443
Genomic context: Chromosome
Annotation: NC_017279.1 (1454273 . . . 1457227, complement)
ID: 12250720
SEQ ID NO: 178
118. csn1
CRISPR-associated protein Csn1 [Streptococcus pyogenes
MGAS1882]
Other Aliases: MGAS1882_0792
Genomic context: Chromosome
Annotation: NC_017053.1 (775696 . . . 779799)
ID: 12014080
SEQ ID NO: 179
119. csn1
CRISPR-associated protein Csn1 [Streptococcus pyogenes
MGAS15252]
Other Aliases: MGAS15252_0796
Genomic context: Chromosome
Annotation: NC_017040.1 (778271 . . . 782374)
ID: 11991096
SEQ ID NO: 180
120. cas3
CRISPR-associated endonuclease [Corynebacterium diphtheriae
HC02]
Other Aliases: CDHC02_0036
Genomic context: Chromosome
Annotation: NC_016802.1 (37125 . . . 40379)
ID: 11739116
SEQ ID NO: 181
121. cas3
CRISPR-associated endonuclease [Corynebacterium diphtheriae
C7 (beta)]
Other Aliases: CDC7B_0035
Genomic context: Chromosome
Annotation: NC_016801.1 (36309 . . . 39563)
ID: 11737358
SEQ ID NO: 182
122. cas3
CRISPR-associated endonuclease [Corynebacterium diphtheriae
BH8]
Other Aliases: CDBH8_0038
Genomic context: Chromosome
Annotation: NC_016800.1 (37261 . . . 40515)
ID: 11735325
SEQ ID NO: 183
123. cas3
CRISPR-associated endonuclease [Corynebacterium diphtheriae
31A]
Other Aliases: CD31A_0036
Genomic context: Chromosome
Annotation: NC_016799.1 (34597 . . . 37851)
ID: 11731168
SEQ ID NO: 184
124. cas3
CRISPR-associated endonuclease [Corynebacterium diphtheriae
VA01]
Other Aliases: CDVA01_0033
Genomic context: Chromosome
Annotation: NC_016790.1 (34795 . . . 38049)
ID: 11717708
SEQ ID NO: 185
125. cas3
CRISPR-associated endonuclease [Corynebacterium diphtheriae
HC01]
Other Aliases: CDHC01_0034
Genomic context: Chromosome
Annotation: NC_016786.1 (35060 . . . 38314)
ID: 11708318
SEQ ID NO: 186
126. cas9
CRISPR-associated protein [Corynebacterium diphtheriae HC01]
Other Aliases: CDHC01_2103
Genomic context: Chromosome
Annotation: NC_016786.1 (2246368 . . . 2248998)
ID: 11708126
SEQ ID NO: 187
127. PARA_18570
hypothetical protein [Haemophilus parainfluenzae T3T1]
Other Aliases: PARA_18570
Genomic context: Chromosome
Annotation: NC_015964.1 (1913335 . . . 1916493)
ID: 11115627
SEQ ID NO: 188
128. HDN1F_34120
hypothetical protein [gamma proteobacterium HdN1]
Other Aliases: HDN1F_34120
Genomic context: Chromosome
Annotation: NC_014366.1 (4143336 . . . 4146413, complement)
ID: 9702142
SEQ ID NO: 189
129. SPy_1046
hypothetical protein [Streptococcus pyogenes M1 GAS]
Other Aliases: SPy_1046
Genomic context: Chromosome
Annotation: NC_002737.1 (854757 . . . 858863)
ID: 901176
SEQ ID NO: 190
130. GBS222_0765
Hypothetical protein [Streptococcus agalactiae]
Other Aliases: GBS222_0765
Annotation: NC_021195.1 (810875 . . . 814987)
ID: 15484689
SEQ ID NO: 191
131. NE061598_03330
hypothetical protein [Francisella tularensis subsp. tularensis
NE061598]
Other Aliases: NE061598_03330
Genomic context: Chromosome
Annotation: NC_017453.1 (601219 . . . 604590)
ID: 12437259
SEQ ID NO: 192
132. NMV_1993
hypothetical protein [Neisseria meningitidis 8013]
Other Aliases: NMV_1993
Annotation: NC_017501.1 (1917073 . . . 1920321)
ID: 12393700
SEQ ID NO: 193
133. csn1
hypothetical protein [Campylobacter jejuni subsp. jejuni M1]
Other Aliases: CJM1_1467
Genomic context: Chromosome
Annotation: NC_017280.1 (1433667 . . . 1436252, complement)
ID: 12249021
SEQ ID NO: 194
134. FTU_0629
hypothetical protein [Francisella tularensis subsp. tularensis
TIGB03]
Other Aliases: FTU_0629
Genomic context: Chromosome
Annotation: NC_016933.1 (677092 . . . 680463)
ID: 11890131
SEQ ID NO: 195
135. NMAA_0315
hypothetical protein [Neisseria meningitidis WUE 2594]
Other Aliases: NMAA_0315
Annotation: NC_017512.1 (377010 . . . 380258, complement)
ID: 12407849
SEQ ID NO: 196
136. WS1445
hypothetical protein [Wolinella succinogenes DSM 1740]
Other Aliases: WS1445
Genomic context: Chromosome
Annotation: NC_005090.1 (1388202 . . . 1391381, complement)
ID: 2554690
SEQ ID NO: 197
137. THITE_2123823
hypothetical protein [Thielavia terrestris NRRL 8126]
Other Aliases: THITE_2123823
Chromosome: 6
Annotation: Chromosome 6NC_016462.1 (1725696 . . . 1725928)
ID: 11523019
SEQ ID NO: 198
138. XAC29_16635
hypothetical protein [Xanthomonas axonopodis Xac29-1]
Other Aliases: XAC29_16635
Genomic context: Chromosome
Annotation: NC_020800.1 (3849847 . . . 3850302)
ID: 14853997
SEQ ID NO: 199
139. M1GAS476_0830
hypothetical protein [Streptococcus pyogenes M1 476]
Other Aliases: M1GAS476_0830
Chromosome: 1
Annotation: NC_020540.1 (792119 . . . 796225)
ID: 14819166
SEQ ID NO: 200
140. Piso0_000203
Piso0_000203 [Millerozyma farinosa CBS 7064]
Other Aliases: GNLVRS01_PISO0A04202g
Other Designations: hypothetical protein
Chromosome: A
Annotation: NC_020226.1 (343553 . . . 343774, complement)
ID: 14528449
SEQ ID NO: 201
141. G148_0828
hypothetical protein [Riemerella anatipestifer RA-CH-2]
Other Aliases: G148_0828
Genomic context: Chromosome
Annotation: NC_020125.1 (865673 . . . 869875)
ID: 14447195
SEQ ID NO: 202
142. csn1
hypothetical protein [Streptococcus dysgalactiae subsp.
equisimilis AC-2713]
Other Aliases: SDSE_1207
Annotation: NC_019042.1 (1134173 . . . 1138288, complement)
ID: 13901498
SEQ ID NO: 203
143. A964_0899
hypothetical protein [Streptococcus agalactiae GD201008-001]
Other Aliases: A964_0899
Genomic context: Chromosome
Annotation: NC_018646.1 (935164 . . . 939276)
ID: 13681619
SEQ ID NO: 204
144. FNFX1_0762
hypothetical protein [Francisella cf. novicida Fx1]
Other Aliases: FNFX1_0762
Genomic context: Chromosome
Annotation: NC_017450.1 (781484 . . . 786373)
ID: 12435564
SEQ ID NO: 205
145. FTV_0545
hypothetical protein [Francisella tularensis subsp. tularensis
TI0902]
Other Aliases: FTV_0545
Genomic context: Chromosome
Annotation: NC_016937.1 (601185 . . . 604556)
ID: 11880693
SEQ ID NO: 206
146. FTL_1327
hypothetical protein [Francisella tularensis subsp. holarctica
LVS]
Other Aliases: FTL_1327
Genomic context: Chromosome
Annotation: NC_007880.1 (1262508 . . . 1263689, complement)
ID: 3952607
SEQ ID NO: 207
147. FTL_1326
hypothetical protein [Francisella tularensis subsp. holarctica
LVS]
Other Aliases: FTL_1326
Genomic context: Chromosome
Annotation: NC_007880.1 (1261927 . . . 1262403, complement)
ID: 3952606
SEQ ID NO: 208

1. An in vitro method for modifying a genome at a genomic locus of interest in a mouse ES cell, the method comprising:
contacting the mouse ES cell with:
a Cas9 protein;
a CRISPR RNA that hybridizes to a CRISPR target sequence at the genomic locus of interest;
a tracrRNA; and
an incoming nucleic acid sequence that is flanked by:
(i) a 5′ homology arm that is homologous to a 5′ target sequence at the genomic locus of interest; and
(ii) a 3′ homolog arm that is homologous to a 3′ target sequence at the genomic locus of interest;
wherein the incoming nucleic acid sequence is at least 20 kb in size;
wherein following the contacting step, the genome of the mouse ES cell is modified to comprise a targeted genetic modification comprising:
deletion of a region of the genomic locus of interest wherein the deletion is at least 20 kb; and/or
insertion of the insert nucleic acid at the genomic locus of interest wherein the insertion is at least 20 kb.
wherein the targeted genomic modification comprises insertion of:
a. One or more human antibody heavy chain variable domains;
b. One or more human antibody kappa light chain variable domains; or
c. One or more human antibody lambda light chain variable domains;

2. The method of claim 1, wherein the targeted genomic modification comprises deletion of one or more mouse antibody heavy chain variable domains and insertion of one or more human antibody heavy chain variable domains.

3. The method of claim 1, wherein the targeted genomic modification comprises deletion of one or more mouse antibody kappa light chain variable domains and insertion of one or more human antibody kappa light chain variable domains.

4. The method of claim 1, wherein the targeted genomic modification comprises deletion of one or more mouse antibody lambda light chain variable domains and insertion of one or more human antibody lambda light chain variable domains.

5. The method of claim 1, wherein the mouse ES cell or progeny thereof is developed into a mouse.

6. A mouse obtained by the method of claim 1.

7. The mouse of claim 6, wherein the mouse is heterozygous for the targeted genomic modification.

8. The mouse of claim 6, wherein the mouse is homozygous for the targeted genomic modification.

9. The mouse of claim 6, wherein the mouse further comprises a targeted modification to insert one or more human antibody kappa light chain variable domains.

10. The mouse of claim 6, wherein the mouse further comprises a homozygous targeted modification to insert one or more human antibody kappa light chain variable domains.

11. An antibody produced by the mouse of claim 6.

12. The antibody according to claim 11, wherein the mouse is heterozygous for the targeted genomic modification.

13. The antibody according to claim 11, wherein the mouse is homozygous for the targeted genomic modification

14. The antibody according to claim 11, wherein the mouse further comprises a targeted modification to insert one or more human antibody kappa light chain variable domains.

15. The antibody according to claim 11, wherein the mouse further comprises a homozygous targeted modification to insert one or more human antibody kappa light chain variable domains.

16. A method for producing an antibody comprising:
producing a mouse with a modified genome from the ES cell modified by the method of claim 1 or a progeny thereof,
immunizing the mouse with an antigen, and
isolating an antibody produced by the mouse.

17. The method of claim 16, wherein the targeted genomic modification comprises deletion of one or more mouse antibody heavy chain variable domains and insertion of one or more human antibody heavy chain variable domains

18. The method of claim 16, wherein the targeted genomic modification comprises deletion of one or more mouse antibody kappa light chain variable domains and insertion of one or more human antibody kappa light chain variable domains.

19. The method of claim 16, wherein the targeted genomic modification comprises deletion of one or more mouse antibody lambda light chain variable domains and insertion of one or more human antibody lambda light chain variable domains.

The application's sequence listing, which the Patent Office published only in electronic form, follows.

SEQUENCE LISTING (208 sequences)

SEQ ID NO: 1 - RNA, 11 nt, Artificial Sequence
  Description of Artificial Sequence: Synthetic oligonucleotide
  An example of part of gRNA before linker sequence
uuuuagagcua

SEQ ID NO: 2 - RNA, 13 nt, Artificial Sequence
  Description of Artificial Sequence: Synthetic oligonucleotide
  An example of part of gRNA following linker sequence
uagcaaguuaaaa

SEQ ID NO: 3 - RNA, 12 nt, Artificial Sequence
  Description of Artificial Sequence: Synthetic oligonucleotide
  Exemplary portion of gRNA (crRNA)
  modified_base (1)..(1): a, c, u or g
  modified_base (7)..(8): a, c, u or g
nuuuuanngcua

SEQ ID NO: 4 - RNA, 16 nt, Artificial Sequence
  Description of Artificial Sequence: Synthetic oligonucleotide
  Exemplary tracrRNA which comprises a portion of a gRNA
  modified_base (5)..(9): a, c, u or g
  misc_feature (5)..(9): This region may encompass 5, 4, 3, 2, or 1 nucleotides, wherein some positions may be absent
  modified_base (16)..(16): a, c, u or g
uagcnnnnnuuaaaan

SEQ ID NO: 5 - RNA, 26 nt, Artificial Sequence
  Description of Artificial Sequence: Synthetic oligonucleotide
  An example of a tracrRNA
uagcaaguuaaaauaaggcuaguccg

SEQ ID NO: 6 - RNA, 76 nt, Artificial Sequence
  Description of Artificial Sequence: Synthetic oligonucleotide
  An example of a gRNA
guuuuagagcuagaaauagcaaguuaaaauaaggcuaguccguuaucaacuugaaaaaguggcaccgagucggugc

SEQ ID NO: 7 - DNA, 1340 bp, Artificial Sequence
  Description of Artificial Sequence: Synthetic polynucleotide
  Fragment 1A (1340 bp)
ggtaccgggccccccctcgaggtcgacggtatcgataagcttgatgagggcctatttcccatgattccttcatatttgcatatacgatacaaggctgttagagagataattggaattaatttgactgtaaacacaaagatattagtacaaaatacgtgacgtagaaagtaataatttcttgggtagtttgcagttttaaaattatgttttaaaatggactatcatatgcttaccgtaacttgaaagtatttcgatttcttggctttatatatcttgtggaaaggacgaaacaccgggtcttcgagaagacctgttttagagctagaaatagcaagttaaaataaggctagtccgttatcaacttgaaaaagtggcaccgagtcggtgcttttttgttttagagctagaaatagcaagttaaaataaggctagtccgtttttagcgcgtgcgccaattctgcagacaaatggctctagaggtacccgttacataacttacggtaaatggcccgcctggctgaccgcccaacgacccccgcccattgacgtcaatagtaacgccaatagggactttccattgacgtcaatgggtggagtatttacggtaaactgcccacttggcagtacatcaagtgtatcatatgccaagtacgccccctattgacgtcaatgacggtaaatggcccgcctggcattgtgcccagtacatgaccttatgggactttcctacttggcagtacatctacgtattagtcatcgctattaccatggtcgaggtgagccccacgttctgcttcactctccccatctcccccccctccccacccccaattttgtatttatttattttttaattattttgtgcagcgatgggggcggggggggggggggggcgcgcgccaggcggggcggggcggggcgaggggcggggcggggcgaggcggagaggtgcggcggcagccaatcagagcggcgcgctccgaaagtttccttttatggcgaggcggcggcggcggcggccctataaaaagcgaagcgcgcggcgggcgggagtcgctgcgacgctgccttcgccccgtgccccgctccgccgccgcctcgcgccgcccgccccggctctgactgaccgcgttactcccacaggtgagcgggcgggacggcccttctcctccgggctgtaattagctgagcaagaggtaagggtttaagggatggttggttggtggggtattaatgtttaattacctggagcacctgcctgaaatcactttttttcaggttggaccggtgccaccatggactataaggaccacgacggagactacaaggatcatgatatt

SEQ ID NO: 8 - DNA, 852 bp, Artificial Sequence
  Description of Artificial Sequence: Synthetic polynucleotide
  Fragment 2 (852 bp)
atggactataaggaccacgacggagactacaaggatcatgatattgattacaaagacgatgacgataagatggccccaaagaagaagcggaaggtcggtatccacggagtcccagcagccgacaagaagtacagcatcggcctggacatcggcaccaactctgtgggctgggccgtgatcaccgacgagtacaaggtgcccagcaagaaattcaaggtgctgggcaacaccgaccggcacagcatcaagaagaacctgatcggagccctgctgttcgacagcggcgaaacagccgaggccacccggctgaagagaaccgccagaagaagatacaccagacggaagaaccggatctgctatctgcaagagatcttcagcaacgagatggccaaggtggacgacagcttcttccacagactggaagagtccttcctggtggaagaggataagaagcacgagcggcaccccatcttcggcaacatcgtggacgaggtggcctaccacgagaagtaccccaccatctaccacctgagaaagaaactggtggacagcaccgacaaggccgacctgcggctgatctatctggccctggcccacatgatcaagttccggggccacttcctgatcgagggcgacctgaaccccgacaacagcgacgtggacaagctgttcatccagctggtgcagacctacaaccagctgttcgaggaaaaccccatcaacgccagcggcgtggacgccaaggccatcctgtctgccagactgagcaagagcagacggctggaaaatctgatcgcccagctgcccggcgagaagaagaatggcctgttcggaaacctgattgccctgagc

SEQ ID NO: 9 - DNA, 920 bp, Artificial Sequence
  Description of Artificial Sequence: Synthetic polynucleotide
  Fragment 3 (920 bp)
ggcgagaagaagaatggcctgttcggaaacctgattgccctgagcctgggcctgacccccaacttcaagagcaacttcgacctggccgaggatgccaaactgcagctgagcaaggacacctacgacgacgacctggacaacctgctggcccagatcggcgaccagtacgccgacctgtttctggccgccaagaacctgtccgacgccatcctgctgagcgacatcctgagagtgaacaccgagatcaccaaggcccccctgagcgcctctatgatcaagagatacgacgagcaccaccaggacctgaccctgctgaaagctctcgtgcggcagcagctgcctgagaagtacaaagagattttcttcgaccagagcaagaacggctacgccggctacattgacggcggagccagccaggaagagttctacaagttcatcaagcccatcctggaaaagatggacggcaccgaggaactgctcgtgaagctgaacagagaggacctgctgcggaagcagcggaccttcgacaacggcagcatcccccaccagatccacctgggagagctgcacgccattctgcggcggcaggaagatttttacccattcctgaaggacaaccgggaaaagatcgagaagatcctgaccttccgcatcccctactacgtgggccctctggccaggggaaacagcagattcgcctggatgaccagaaagagcgaggaaaccatcaccccctggaacttcgaggaagtggtggacaagggcgcttccgcccagagcttcatcgagcggatgaccaacttcgataagaacctgcccaacgagaaggtgctgcccaagcacagcctgctgtacgagtacttcaccgtgtataacgagctgaccaaagtgaaatacgtgaccgagggaatgagaaagcc

SEQ ID NO: 10 - DNA, 920 bp, Artificial Sequence
  Description of Artificial Sequence: Synthetic polynucleotide
  Fragment 4 (920 bp)
cgagctgaccaaagtgaaatacgtgaccgagggaatgagaaagcccgccttcctgagcggcgagcagaaaaaggccatcgtggacctgctgttcaagaccaaccggaaagtgaccgtgaagcagctgaaagaggactacttcaagaaaatcgagtgcttcgactccgtggaaatctccggcgtggaagatcggttcaacgcctccctgggcacataccacgatctgctgaaaattatcaaggacaaggacttcctggacaatgaggaaaacgaggacattctggaagatatcgtgctgaccctgacactgtttgaggacagagagatgatcgaggaacggctgaaaacctatgcccacctgttcgacgacaaagtgatgaagcagctgaagcggcggagatacaccggctggggcaggctgagccggaagctgatcaacggcatccgggacaagcagtccggcaagacaatcctggatttcctgaagtccgacggcttcgccaacagaaacttcatgcagctgatccacgacgacagcctgacctttaaagaggacatccagaaagcccaggtgtccggccagggcgatagcctgcacgagcacattgccaatctggccggcagccccgccattaagaagggcatcctgcagacagtgaaggtggtggacgagctcgtgaaagtgatgggccggcacaagcccgagaacatcgtgatcgaaatggccagagagaaccagaccacccagaagggacagaagaacagccgcgagagaatgaagcggatcgaagagggcatcaaagagctgggcagccagatcctgaaagaacaccccgtggaaaacacccagctgcagaacgagaagctgtacctgtactacctgcagaatgggcgggatatgtacgtggaccaggaactgg

SEQ ID NO: 11 - DNA, 920 bp, Artificial Sequence
  Description of Artificial Sequence: Synthetic polynucleotide
  Fragment 5 (920 bp)
actacctgcagaatgggcgggatatgtacgtggaccaggaactggacatcaaccggctgtccgactacgatgtggaccatatcgtgcctcagagctttctgaaggacgactccatcgacaacaaggtgctgaccagaagcgacaagaaccggggcaagagcgacaacgtgccctccgaagaggtcgtgaagaagatgaagaactactggcggcagctgctgaacgccaagctgattacccagagaaagttcgacaatctgaccaaggccgagagaggcggcctgagcgaactggataaggccggcttcatcaagagacagctggtggaaacccggcagatcacaaagcacgtggcacagatcctggactcccggatgaacactaagtacgacgagaatgacaagctgatccgggaagtgaaagtgatcaccctgaagtccaagctggtgtccgatttccggaaggatttccagttttacaaagtgcgcgagatcaacaactaccaccacgcccacgacgcctacctgaacgccgtcgtgggaaccgccctgatcaaaaagtaccctaagctggaaagcgagttcgtgtacggcgactacaaggtgtacgacgtgcggaagatgatcgccaagagcgagcaggaaatcggcaaggctaccgccaagtacttcttctacagcaacatcatgaactttttcaagaccgagattaccctggccaacggcgagatccggaagcggcctctgatcgagacaaacggcgaaaccggggagatcgtgtgggataagggccgggattttgccaccgtgcggaaagtgctgagcatgccccaagtgaatatcgtgaaaaagaccgaggtgcagacaggcggcttcagcaaagagtctatcctgcccaagaggaacagcgataagctgatc

SEQ ID NO: 12 - DNA, 789 bp, Artificial Sequence
  Description of Artificial Sequence: Synthetic polynucleotide
  Fragment 6 (789 bp)
agcaaagagtctatcctgcccaagaggaacagcgataagctgatcgccagaaagaaggactgggaccctaagaagtacggcggcttcgacagccccaccgtggcctattctgtgctggtggtggccaaagtggaaaagggcaagtccaagaaactgaagagtgtgaaagagctgctggggatcaccatcatggaaagaagcagcttcgagaagaatcccatcgactttctggaagccaagggctacaaagaagtgaaaaaggacctgatcatcaagctgcctaagtactccctgttcgagctggaaaacggccggaagagaatgctggcctctgccggcgaactgcagaagggaaacgaactggccctgccctccaaatatgtgaacttcctgtacctggccagccactatgagaagctgaagggctcccccgaggataatgagcagaaacagctgtttgtggaacagcacaagcactacctggacgagatcatcgagcagatcagcgagttctccaagagagtgatcctggccgacgctaatctggacaaagtgctgtccgcctacaacaagcaccgggataagcccatcagagagcaggccgagaatatcatccacctgtttaccctgaccaatctgggagcccctgccgccttcaagtactttgacaccaccatcgaccggaagaggtacaccagcaccaaagaggtgctggacgccaccctgatccaccagagcatcaccggcctgtacgagacacggatcgacctgtctcagctgggaggcgac

SEQ ID NO: 13 - DNA, 535 bp, Artificial Sequence
  Description of Artificial Sequence: Synthetic polynucleotide
  Fragment 7 (535 bp)
ggcctgtacgagacacggatcgacctgtctcagctgggaggcgacaaaaggccggcggccacgaaaaaggccggccaggcaaaaaagaaaaagtaagaattcctagagctcgctgatcagcctcgactgtgccttctagttgccagccatctgttgtttgcccctcccccgtgccttccttgaccctggaaggtgccactcccactgtcctttcctaataaaatgaggaaattgcatcgcattgtctgagtaggtgtcattctattctggggggtggggtggggcaggacagcaagggggaggattgggaagagaatagcaggcatgctggggagcggccgcaggaacccctagtgatggagttggccactccctctctgcgcgctcgctcgctcactgaggccgggcgaccaaaggtcgcccgacgcccgggctttgcccgggcggcctcagtgagcgagcgagcgcgcagctgcctgcaggggcgcctatcgaattcctgcagcccgggggatccactagttctagagcggcc

SEQ ID NO: 14 - DNA, 852 bp, Artificial Sequence
  Description of Artificial Sequence: Synthetic polynucleotide
  Fragment 2A (852 bp)
atggactataaggaccacgacggagactacaaggatcatgatattgattacaaagacgatgacgataagatggccccaaagaagaagcggaaggtcggtatccacggagtcccagcagccgacaagaagtacagcatcggcctggccatcggcaccaactctgtgggctgggccgtgatcaccgacgagtacaaggtgcccagcaagaaattcaaggtgctgggcaacaccgaccggcacagcatcaagaagaacctgatcggagccctgctgttcgacagcggcgaaacagccgaggccacccggctgaagagaaccgccagaagaagatacaccagacggaagaaccggatctgctatctgcaagagatcttcagcaacgagatggccaaggtggacgacagcttcttccacagactggaagagtccttcctggtggaagaggataagaagcacgagcggcaccccatcttcggcaacatcgtggacgaggtggcctaccacgagaagtaccccaccatctaccacctgagaaagaaactggtggacagcaccgacaaggccgacctgcggctgatctatctggccctggcccacatgatcaagttccggggccacttcctgatcgagggcgacctgaaccccgacaacagcgacgtggacaagctgttcatccagctggtgcagacctacaaccagctgttcgaggaaaaccccatcaacgccagcggcgtggacgccaaggccatcctgtctgccagactgagcaagagcagacggctggaaaatctgatcgcccagctgcccggcgagaagaagaatggcctgttcggaaacctgattgccctgagc

SEQ ID NO: 15 - DNA, 24 bp, Artificial Sequence
  Description of Artificial Sequence: Synthetic oligonucleotide
  An example oligo
  modified_base (6)..(24): a, c, t or g
caccgnnnnnnnnnnnnnnnnnnn

SEQ ID NO: 16 - DNA, 24 bp, Artificial Sequence
  Description of Artificial Sequence: Synthetic oligonucleotide
  An example oligo
  modified_base (5)..(23): a, c, t or g
aaacnnnnnnnnnnnnnnnnnnnc

SEQ ID NO: 17 - DNA, 122 bp, Artificial Sequence
  Description of Artificial Sequence: Synthetic polynucleotide
  Example T7-gRNA Sequence
  modified_base (21)..(40): a, c, t or g
ttaatacgactcactataggnnnnnnnnnnnnnnnnnnnngttttagagctagaaatagcaagttaaaataaggctagtccgttatcaacttgaaaaagtggcaccgagtcggtgctttttt

SEQ ID NO: 18 - DNA, 112 bp, Artificial Sequence
  Description of Artificial Sequence: Synthetic polynucleotide
  Fragment 1 (111 bp)
ggtaccgggccccccctcgaggtcgacggtatcgataagcttgataatacgactcactatagggagaatggactataaggaccacgacggagactacaaggatcatgatatt

SEQ ID NO: 19 - DNA, 20 bp, Artificial Sequence
  Description of Artificial Sequence: Synthetic oligonucleotide
  Primer Cas9-F
ttaatacgactcactatagg

SEQ ID NO: 20 - DNA, 21 bp, Artificial Sequence
  Description of Artificial Sequence: Synthetic oligonucleotide
  Primer Cas9-R used for PCR amplification
gcgagctctaggaattcttac

SEQ ID NO: 21 - DNA, 20 bp, Artificial Sequence
  Description of Artificial Sequence: Synthetic oligonucleotide
  Primer CgRNA-F
ttaatacgactcactatagg

SEQ ID NO: 22 - DNA, 24 bp, Artificial Sequence
  Description of Artificial Sequence: Synthetic oligonucleotide
  Primer CgRNA-R
aaaaaagcaccgactcggtgccac

SEQ ID NO: 23 - DNA, 3108 bp, Artificial Sequence
  Description of Artificial Sequence: Synthetic polynucleotide
  Sequence of Rosa26 5-prime homology arm
cacatttggtcctgcttgaacattgccatggctcttaaagtcttaattaagaatattaattgtgtaattattgtttttcctcctttagatcattccttgaggacaggacagtgcttgtttaaggctatatttctgctgtctgagcagcaacaggtcttcgagatcaacatgatgttcataatcccaagatgttgccatttatgttctcagaagcaagcagaggcatgatggtcagtgacagtaatgtcactgtgttaaatgttgctatgcagtttggatttttctaatgtagtgtaggtagaacatatgtgttctgtatgaattaaactcttaagttacaccttgtataatccatgcaatgtgttatgcaattaccattttaagtattgtagctttctttgtatgtgaggataaaggtgtttgtcataaaatgttttgaacatttccccaaagttccaaattataaaaccacaacgttagaacttatttatgaacaatggttgtagtttcatgcttttaaaatgcttaattattcaattaacaccgtttgtgttataatatatataaaactgacatgtagaagtgtttgtccagaacatttcttaaatgtatactgtctttagagagtttaatatagcatgtcttttgcaacatactaacttttgtgttggtgcgagcaatattgtgtagtcattttgaaaggagtcatttcaatgagtgtcagattgttttgaatgttattgaacattttaaatgcagacttgttcgtgttttagaaagcaaaactgtcagaagctttgaactagaaattaaaaagctgaagtatttcagaagggaaataagctacttgctgtattagttgaaggaaagtgtaatagcttagaaaatttaaaaccatatagttgtcattgctgaatatctggcagatgaaaagaaatactcagtggttcttttgagcaatataacagcttgttatattaaaaattttccccacagatataaactctaatctataactcataaatgttacaaatggatgaagcttacaaatgtggcttgacttgtcactgtgcttgttttagttatgtgaaagtttggcaataaacctatgtcctaaatagtcaaactgtggaatgactttttaatctattggtttgtctagaacagttatgttgccatttgccctaatggtgaaagaaaaagtggggagtgccttggcactgttcatttgtggtgtgaaccaaagaggggggcatgcacttacacttcaaacatccttttgaaagactgacaagtttgggtcttcacagttggaattgggcatcccttttgtcagggagggagggagggagggaggctggcttgttatgctgacaagtgtgattaaattcaaactttgaggtaagttggaggaacttgtacattgttaggagtgtgacaatttggactcttaatgatttggtcatacaaaatgaacctagaccaacttctggaagatgtatataataactccatgttacattgatttcacctgactaatacttatcccttatcaattaaatacagaagatgccagccatctgggccttttaacccagaaatttagtttcaaactcctaggttagtgttctcactgagctacatcctgatctagtcctgaaaataggaccaccatcacccccaaaaaaatctcaaataagatttatgctagtgtttcaaaattttaggaataggtaagattagaaagttttaaattttgagaaatggcttctctagaaagatgtacatagtgaacactgaatggctcctaaagagcctagaaaactggtactgagcacacaggactgagaggtctttcttgaaaagcatgtattgctttacgtgggtcacagaaggcaggcaggaagaacttgggctgaaactggtgtcttaagtggctaacatcttcacaactgatgagcaagaactttatcctgatgcaaaaaccatccaaacaaactaagtgaaaggtggcaatggatcccaggctgctctagaggaggacttgacttctcatcccatcacccacaccagatagctcatagactgccaattaacaccagcttctagcctccacaggcacctgcactggtacacataatttcacacaaacacagtaagaagccttccacctggcatggtattgcttatctttagttcccaacacttgggaggcagaggccagccagggctatgtgacaaaaaccttgtctagaggagaaacttcatagcttatttcctattcacgtaaccaggttagcaaaatttaccagccagagatgaagctaacagtgtccactatatttgtagtgttttaagtcaattttttaaatatacttaatagaattaaagctatggtgaaccaagtacaaacctggtgtattaacttgagaacttagcataaaaagtagttcatttgttcagtaaatattaaatgcttactggcaaagattatgtcaggaacttggtaaatggtgatgaaacaatcatagttgtacatcttggttctgtgatcaccttggtttgaggtaaaagtggttcctttgatcaaggatggaattttaagtttatattcaatcaataatgtattattttgtgattgcaaaattgcctatctagggtataaaacctttaaaaatttcataataccagttcattctccagttactaattccaaaaagccactgactatggtgccaatgtggattctgttctcaaaggaaggattgtctgtgccctttattctaatagaaacatcacactgaaaatctaagctgaaagaagccagactttcctaaataaataactttccataaagctcaaacaaggattacttttaggaggcactgttaaggaactgataagtaatgaggttacttatataatgatagtcccacaagactatctgaggaaaaatcagtacaactcgaaaacagaacaaccagctaggcaggaataacagggctcccaagtcaggaggtctatccaacacccttttctgttgagggccccagacctacatattgtatacaaacagggaggtgggtgattttaactctcctgaggtac

SEQ ID NO: 24 - DNA, 3102 bp, Artificial Sequence
  Description of Artificial Sequence: Synthetic polynucleotide
  Sequence of Rosa26 3-prime homology arm
cttggtaaatctttgtcctgagtaagcagtacagtgtacagtttacattttcatttaaagatacattagctccctctaccccctaagactgacaggcactttgggggtggggagggctttggaaaataacgcttccatacactaaaagagaaatttctttaattaggcttgttggttccatacatctactggtgtttctactacttagtaatattataatagtcacacaagcatctttgctctgtttaggttgtatatttattttaaggcagatgataaaactgtagatcttaagggatgcttctgcttctgagatgatacaaagaatttagaccataaaacagtaggttgcacaagcaatagaatatggcctaaagtgttctgacacttagaagccaagcagtgtaggcttcttaagaaataccattacaatcaccttgctagaaatcaagcattctggagtggtcaagcagtgtaacctgtactgtaagttacttttctgctatttttctcccaaagcaagttctttatgctgatatttccagtgttaggaactacaaatattaataagttgtcttcactcttttctttaccaaggagggtctcttccttcatcttgatctgaaggatgaacaaaggcttgagcagtgcgctttagaagataaactgcagcatgaaggcccccgatgttcacccagactacatggacctttcgccacacatgtcccattccagataaggcctggcacacacaaaaaacataagtcattaggctaccagtctgattctaaaacaacctaaaatcttcccacttaaatgctatgggtggtgggttggaaagttgactcagaaaatcacttgctgtttttagagaggatctgggttcagtttctgatacattgtggcttacaactataactccagttctagggggtccatccaacatcctcttctgttgagggcaccaaataaatgtattgtgtacaaacagggaggtgagtgatttaactctcgtgtatagtaccttggtaaaacatttcttgtcctgagtaagcagtacagctctgcctgtccctggtctacagacacggctcatttcccgaaggcaagctggatagagattccaatttctcttcttggatcccatcctataaaagaaggtcaagtttaatctattgcaaaaggtaaataggtagtttcttacatgagacaagaacaaatcttaggtgtgaagcagtcatcttttacaggccagagcctctattctatgccaatgaaggaaactgttagtccagtgttatagagttagtccagtgtatagttttctatcagaacactttttttttaaacaactgcaacttagcttattgaagacaaaccacgagtagaaatctgtccaagaagcaagtgcttctcagcctacaatgtggaataggaccatgtaatggtacagtgagtgaaatgaattatggcatgtttttctgactgagaagacagtacaataaaaggtaaactcatggtatttatttaaaaagaatccaatttctacctttttccaaatggcatatctgttacaataatatccacagaagcagttctcagtgggaggttgcagatatcccactgaacagcatcaatgggcaaaccccaggttgtttttctgtggagacaaaggtaagatatttcaatatattttcccaagctaatgagatggctcagcaaataatggtactggccattaagtctcatgacctgagcttgatcctcagggaccatgtggtacaaggagagacctaaatccttcagttggacttcaatcttctaccctcatgtccacacacaaataaatacaataaaaaacattctgcagtctgaatttctaaaggttgtttttctaaaaagaaatgttaaagtaacataggaagaaatatgtccataactgaaatacaagttttttaaatggttaagactggttttcaaaggatgtatggttaagaaaataccagggaaaatgagcttacatgtaaaaaagtgtctaaaaggccagagaaatgacccagctggcaaaggtgtctgccctaagccagacaaaaggaatttgattcacaggaagaagagacccaactctcactagttatcctctgacttccacaccatgacacagctccatggcactctcaggcccccacacatatacagatataaacagaaacctaatccaccagccttcagaagcaaagcaattggaggatttaaacaggccatggctactaatagagataactggtagtttaaaagttatggtaatgactttcatgcttctttcaactcatattgttctaaataattaatttggtttttcaaggcagggtttctctgtgtagttctggctgtcctggaactcactctgtagaccaggctggccttgaactcagatccatctgcctctggaataagggcacgtgcgtgccttttctacataacaaaacctatactataacaaaacctataccatactgtaccgttttgggaaaagacaaaaaataatgaacaaaaaaggagaaataacattccaataaagtatggaaatggtagttaaattaattacaaatgtttttcagtaaattagatgtgacttctcatactgttcatttggctataatgataccacaaagcactgggggtgaataataattccaagtcagtagggagagagacttgaaaagatgcaatgcaatcattgaagttaaacttacccatctttaatctggctcttagtcaatagagatgagatgttatttgctgctctgttcactgccagtgggttattgtccccagcaatatggtaacagtgagaccactcagtagccccctatgagacaggagtgttggttaaacatgccacaagagaaaagggaaaagtcactatggccaactctcagtaacatggcaatccgtgccattcatttccttgccagaaatgtcttccctgttcttctgcctactgaactttcacccactagaaatgtggctccaatgtcatccactatgacatcaatgtcagcgctagaagcactttgcacacctctgttgctgacttag

SEQ ID NO: 25 - DNA, 30 bp, Artificial Sequence
  Description of Artificial Sequence: Synthetic oligonucleotide
  CRISPR consensus sequence of Genome Mth and PaM NGG
atttcaatcccattttggtctgattttaac

SEQ ID NO: 26 - DNA, 29 bp, Artificial Sequence
  Description of Artificial Sequence: Synthetic oligonucleotide
  CRISPR consensus sequence of Genome Lmo and PaM WGG
atttacatttcahaataagtarytaaaac

SEQ ID NO: 27 - DNA, 29 bp, Artificial Sequence
  Description of Artificial Sequence: Synthetic oligonucleotide
  CRISPR consensus sequence of Genome Eco and PaM CWT
cggtttatccccgctggcgcggggaacwc

SEQ ID NO: 28 - DNA, 29 bp, Artificial Sequence
  Description of Artificial Sequence: Synthetic oligonucleotide
  CRISPR consensus sequence of Genome Pae and PaM CTT
cggttcatccccacrcmygtggggaacac

SEQ ID NO: 29 - DNA, 32 bp, Artificial Sequence
  Description of Artificial Sequence: Synthetic oligonucleotide
  CRISPR consensus sequence of Genome Spy and PaM GAA
atttcaatccactcacccatgaagggtgagac

SEQ ID NO: 30 - DNA, 31 bp, Artificial Sequence
  Description of Artificial Sequence: Synthetic oligonucleotide
  CRISPR consensus sequence of Genome Xan and PaM WGG
gtttcaatccacgcgcccgtgaggrcgcgac

SEQ ID NO: 31 - DNA, 28 bp, Artificial Sequence
  Description of Artificial Sequence: Synthetic oligonucleotide
  CRISPR consensus sequence of Genome She and PaM GG
tttctaagccgcctgtgcggcggtgaac

SEQ ID NO: 32 - DNA, 28 bp, Artificial Sequence
  Description of Artificial Sequence: Synthetic oligonucleotide
  CRISPR consensus sequence of Genome Pae and PaM GG
tttcttagctgcctatacggcagtgaac

SEQ ID NO: 33 - DNA, 28 bp, Artificial Sequence
  Description of Artificial Sequence: Synthetic oligonucleotide
  CRISPR consensus sequence of Genome Ype and PaM GG
tttctaagctgcctgtgcggcagtgaac

SEQ ID NO: 34 - DNA, 24 bp, Artificial Sequence
  Description of Artificial Sequence: Synthetic oligonucleotide
  CRISPR consensus sequence of Genome Sso and PaM NGG
ctttcaattctataagagattatc

SEQ ID NO: 35 - DNA, 24 bp, Artificial Sequence
  Description of Artificial Sequence: Synthetic oligonucleotide
  CRISPR consensus sequence of Genome Mse and PaM NGG
ctttcaactctataggagattaac

SEQ ID NO: 36 - DNA, 36 bp, Artificial Sequence
  Description of Artificial Sequence: Synthetic oligonucleotide
  CRISPR consensus sequence of Genome Str and PaM NGG
gttttagagctatgctgttttgaatggtcccaaaac

SEQ ID NO: 37 - DNA, 36 bp, Artificial Sequence
  Description of Artificial Sequence: Synthetic oligonucleotide
  CRISPR consensus sequence of Genome Lis and PaM NGG
gttttagagctatgttattttgaatgctamcaaaac

SEQ ID NO: 38 - DNA, 10 bp, Artificial Sequence
  Description of Artificial Sequence: Synthetic oligonucleotide
  Leader
agggcggatt

SEQ ID NO: 39 - DNA, 10 bp, Artificial Sequence
  Description of Artificial Sequence: Synthetic oligonucleotide
  Leader
atggccaatt

SEQ ID NO: 40 - DNA, 10 bp, Artificial Sequence
  Description of Artificial Sequence: Synthetic oligonucleotide
  Leader
ccactaactt

SEQ ID NO: 41 - DNA, 10 bp, Artificial Sequence
  Description of Artificial Sequence: Synthetic oligonucleotide
  Leader
ccgctctatt

SEQ ID NO: 42 - DNA, 10 bp, Artificial Sequence
  Description of Artificial Sequence: Synthetic oligonucleotide
  Leader
tctaaacata

SEQ ID NO: 43 - DNA, 10 bp, Artificial Sequence
  Description of Artificial Sequence: Synthetic oligonucleotide
  Leader
tctaaaagta

SEQ ID NO: 44 - DNA, 10 bp, Artificial Sequence
  Description of Artificial Sequence: Synthetic oligonucleotide
  Leader
acttaccgta

SEQ ID NO: 45 - DNA, 10 bp, Artificial Sequence
  Description of Artificial Sequence: Synthetic oligonucleotide
  Leader
ccttaccgta

SEQ ID NO: 46 - DNA, 10 bp, Artificial Sequence
  Description of Artificial Sequence: Synthetic oligonucleotide
  Leader
tgcgccaaat

SEQ ID NO: 47 - DNA, 10 bp, Artificial Sequence
  Description of Artificial Sequence: Synthetic oligonucleotide
  Leader
ccccccttag

SEQ ID NO: 48 - DNA, 10 bp, Artificial Sequence
  Description of Artificial Sequence: Synthetic oligonucleotide
  Leader
gccgccagca

SEQ ID NO: 49 - DNA, 10 bp, Artificial Sequence
  Description of Artificial Sequence: Synthetic oligonucleotide
  Leader
aatagcttat

SEQ ID NO: 50 - DNA, 10 bp, Artificial Sequence
  Description of Artificial Sequence: Synthetic oligonucleotide
  Leader
tgtagaataa

SEQ ID NO: 51 - DNA, 10 bp, Artificial Sequence
  Description of Artificial Sequence: Synthetic oligonucleotide
  Leader
tagctccgaa

SEQ ID NO: 52 - DNA, 10 bp, Artificial Sequence
  Description of Artificial Sequence: Synthetic oligonucleotide
  Leader
tagaccaaaa

SEQ ID NO: 53 - DNA, 10 bp, Artificial Sequence
  Description of Artificial Sequence: Synthetic oligonucleotide
  Leader
gtaagataat

SEQ ID NO: 54 - DNA, 10 bp, Artificial Sequence
  Description of Artificial Sequence: Synthetic oligonucleotide
  Leader
tgagggttta

SEQ ID NO: 55 - DNA, 10 bp, Artificial Sequence
  Description of Artificial Sequence: Synthetic oligonucleotide
  Leader
tgataccttt

SEQ ID NO: 56 - DNA, 10 bp, Artificial Sequence
  Description of Artificial Sequence: Synthetic oligonucleotide
  Leader
tgaaactttt

SEQ ID NO: 57 - DNA, 10 bp, Artificial Sequence
  Description of Artificial Sequence: Synthetic oligonucleotide
  Leader
tgacactctt

SEQ ID NO: 58 - DNA, 10 bp, Artificial Sequence
  Description of Artificial Sequence: Synthetic oligonucleotide
  Leader
ctcgtagact

SEQ ID NO: 59 - DNA, 10 bp, Artificial Sequence
  Description of Artificial Sequence: Synthetic oligonucleotide
  Leader
ctcgtagaaa

SEQ ID NO: 60 - DNA, 10 bp, Artificial Sequence
  Description of Artificial Sequence: Synthetic oligonucleotide
  Leader
ctcgcagaat

SEQ ID NO: 61 - DNA, 10 bp, Artificial Sequence
  Description of Artificial Sequence: Synthetic oligonucleotide
  Leader
ctcgtagaat

SEQ ID NO: 62 - protein, 1037 aa, Parvibaculum lavamentivorans
  CRISPR-associated endonuclease
  ref <308>: DATABASE ACCESSION NUMBER: YP_001411379, NCBI Gene Database
  ref <309>: DATABASE ENTRY DATE: 2013-06-10
MERIFGFDIGTTSIGFSVIDYSSTQSAGNIQRLGVRIFPEARDPDGTPLNQQRRQKRMMRRQLRRRRIRRKALNETLHEAGFLPAYGSADWPVVMADEPYELRRRGLEEGLSAYEFGRAIYHLAQHRHFKGRELEESDTPDPDVDDEKEAANERAATLKALKNEQTTLGAWLARRPPSDRKRGIHAHRNVVAEEFERLWEVQSKFHPALKSEEMRARISDTIFAQRPVFWRKNTLGECRFMPGEPLCPKGSWLSQQRRMLEKLNNLAIAGGNARPLDAEERDAILSKLQQQASMSWPGVRSALKALYKQRGEPGAEKSLKFNLELGGESKLLGNALEAKLADMFGPDWPAHPRKQEIRHAVHERLWAADYGETPDKKRVIILSEKDRKAHREAAANSFVADFGITGEQAAQLQALKLPTGWEPYSIPALNLFLAELEKGERFGALVNGPDWEGWRRTNFPHRNQPTGEILDKLPSPASKEERERISQLRNPTVVRTQNELRKVVNNLIGLYGKPDRIRIEVGRDVGKSKREREEIQSGIRRNEKQRKKATEDLIKNGIANPSRDDVEKWILWKEGQERCPYTGDQIGFNALFREGRYEVEHIWPRSRSFDNSPRNKTLCRKDVNIEKGNRMPFEAFGHDEDRWSAIQIRLQGMVSAKGGTGMSPGKVKRFLAKTMPEDFAARQLNDTRYAAKQILAQLKRLWPDMGPEAPVKVEAVTGQVTAQLRKLWTLNNILADDGEKTRADHRHHAIDALTVACTHPGMTNKLSRYWQLRDDPRAEKPALTPPWDTIRADAEKAVSEIVVSHRVRKKVSGPLHKETTYGDTGTDIKTKSGTYRQFVTRKKIESLSKGELDEIRDPRIKEIVAAHVAGRGGDPKKAFPPYPCVSPGGPEIRKVRLTSKQQLNLMAQTGNGYADLGSNHHIAIYRLPDGKADFEIVSLFDASRRLAQRNPIVQRTRADGASFVMSLAAGEAIMIPEGSKKGIWIVQGVWASGQVVLERDTDADHSTTTRPMPNPILKDDAKKVSIDPIGRVRPSND

SEQ ID NO: 63 - protein, 1629 aa, Francisella novicida
  CRISPR-associated endonuclease
  ref <308>: DATABASE ACCESSION NUMBER: YP_898402, NCBI Gene Database
  ref <309>: DATABASE ENTRY DATE: 2013-06-27
MNFKILPIAIDLGVKNTGVFSAFYQKGTSLERLDNKNGKVYELSKDSYTLLMNNRTARRHQRRGIDRKQLVKRLFKLIWTEQLNLEWDKDTQQAISFLFNRRGFSFITDGYSPEYLNIVPEQVKAILMDIFDDYNGEDDLDSYLKLATEQESKISEIYNKLMQKILEFKLMKLCTDIKDDKVSTKTLKEITSYEFELLADYLANYSESLKTQKFSYTDKQGNLKELSYYHHDKYNIQEFLKRHATINDRILDTLLTDDLDIWNFNFEKFDFDKNEEKLQNQEDKDHIQAHLHHFVFAVNKIKSEMASGGRHRSQYFQEITNVLDENNHQEGYLKNFCENLHNKKYSNLSVKNLVNLIGNLSNLELKPLRKYFNDKIHAKADHWDEQKFTETYCHWILGEWRVGVKDQDKKDGAKYSYKDLCNELKQKVTKAGLVDFLLELDPCRTIPPYLDNNNRKPPKCQSLILNPKFLDNQYPNWQQYLQELKKLQSIQNYLDSFETDLKVLKSSKDQPYFVEYKSSNQQIASGQRDYKDLDARILQFIFDRVKASDELLLNEIYFQAKKLKQKASSELEKLESSKKLDEVIANSQLSQILKSQHTNGIFEQGTFLHLVCKYYKQRQRARDSRLYIMPEYRYDKKLHKYNNTGRFDDDNQLLTYCNHKPRQKRYQLLNDLAGVLQVSPNFLKDKIGSDDDLFISKWLVEHIRGFKKACEDSLKIQKDNRGLLNHKINIARNTKGKCEKEIFNLICKIEGSEDKKGNYKHGLAYELGVLLFGEPNEASKPEFDRKIKKFNSIYSFAQIQQIAFAERKGNANTCAVCSADNAHRMQQIKITEPVEDNKDKIILSAKAQRLPAIPTRIVDGAVKKMATILAKNIVDDNWQNIKQVLSAKHQLHIPIITESNAFEFEPALADVKGKSLKDRRKKALERISPENIFKDKNNRIKEFAKGISAYSGANLTDGDFDGAKEELDHIIPRSHKKYGTLNDEANLICVTRGDNKNKGNRIFCLRDLADNYKLKQFETTDDLEIEKKIADTIWDANKKDFKFGNYRSFINLTPQEQKAFRHALFLADENPIKQAVIRAINNRNRTFVNGTQRYFAEVLANNIYLRAKKENLNTDKISFDYFGIPTIGNGRGIAEIRQLYEKVDSDIQAYAKGDKPQASYSHLIDAMLAFCIAADEHRNDGSIGLEIDKNYSLYPLDKNTGEVFTKDIFSQIKITDNEFSDKKLVRKKAIEGFNTHRQMTRDGIYAENYLPILIHKELNEVRKGYTWKNSEEIKIFKGKKYDIQQLNNLVYCLKFVDKPISIDIQISTLEELRNILTTNNIAATAEYYYINLKTQKLHEYYIENYNTALGYKKYSKEMEFLRSLAYRSERVKIKSIDDVKQVLDKDSNFIIGKITLPFKKEWQRLYREWQNTTIKDDYEFLKSFFNVKSITKLHKKVRKDFSLPISTNEGKFLVKRKTWDNNFIYQILNDSDSRADGTKPFIPAFDISKNEIVEAIIDSFTSKNIFWLPKNIELQKVDNKNIFAIDTSKWFEVETPSDLRDIGIATIQYKIDNNSRPKVRVKLDYVIDDDSKINYFMNHSLLKSRYPDKVLEILKQSTIIEFESSGFNKTIKEMLGMKLAGIYNETSNN

SEQ ID NO: 64 - protein, 984 aa, Campylobacter jejuni
  CRISPR-associated endonuclease
  ref <308>: DATABASE ACCESSION NUMBER: YP_002344900, NCBI Gene Database
  ref <309>: DATABASE ENTRY DATE: 2014-07-11
MARILAFDIGISSIGWAFSENDELKDCGVRIFTKVENPKTGESLALPRRLARSARKRLARRKARLNHLKHLIANEFKLNYEDYQSFDESLAKAYKGSLISPYELRFRALNELLSKQDFARVILHIAKRRGYDDIKNSDDKEKGAILKAIKQNEEKLANYQSVGEYLYKEYFQKFKENSKEFTNVRNKKESYERCIAQSFLKDELKLIFKKQREFGFSFSKKFEEEVLSVAFYKRALKDFSHLVGNCSFFTDEKRAPKNSPLAFMFVALTRIINLLNNLKNTEGILYTKDDLNALLNEVLKNGTLTYKQTKKLLGLSDDYEFKGEKGTYFIEFKKYKEFIKALGEHNLSQDDLNEIAKDITLIKDEIKLKKALAKYDLNQNQIDSLSKLEFKDHLNISFKALKLVTPLMLEGKKYDEACNELNLKVAINEDKKDFLPAFNETYYKDEVTNPVVLRAIKEYRKVLNALLKKYGKVHKINIELAREVGKNHSQRAKIEKEQNENYKAKKDAELECEKLGLKINSKNILKLRLFKEQKEFCAYSGEKIKISDLQDEKMLEIDHIYPYSRSFDDSYMNKVLVFTKQNQEKLNQTPFEAFGNDSAKWQKIEVLAKNLPTKKQKRILDKNYKDKEQKNFKDRNLNDTRYIARLVLNYTKDYLDFLPLSDDENTKLNDTQKGSKVHVEAKSGMLTSALRHTWGFSAKDRNNHLHHAIDAVIIAYANNSIVKAFSDFKKEQESNSAELYAKKISELDYKNKRKFFEPFSGFRQKVLDKIDEIFVSKPERKKPSGALHEETFRKEEEFYQSYGGKEGVLKALELGKIRKVNGKIVKNGDMFRVDIFKHKKTNKFYAVPIYTMDFALKVLPNKAVARSKKGEIKDWILMDENYEFCFSLYKDSLILIQTKDMQEPEFVYYNAFTSSTVSLIVSKHDNKFETLSKNQKILFKNANEKEVIAKSIGIQNLKVFEKYIVSALGEVTKAEFRQREDFKK

SEQ ID NO: 65 - protein, 1187 aa, Bifidobacterium longum
  CRISPR-associated endonuclease
  ref <308>: DATABASE ACCESSION NUMBER: YP_001955845, NCBI Gene Database
  ref <309>: DATABASE ENTRY DATE: 2013-08-26
MLSRQLLGASHLARPVSYSYNVQDNDVHCSYGERCFMRGKRYRIGIDVGLNSVGLAAVEVSDENSPVRLLNAQSVIHDGGVDPQKNKEAITRKNMSGVARRTRRMRRRKRERLHKLDMLLGKFGYPVIEPESLDKPFEEWHVRAELATRYIEDDELRRESISIALRHMARHRGWRNPYRQVDSLISDNPYSKQYGELKEKAKAYNDDATAAEEESTPAQLVVAMLDAGYAEAPRLRWRTGSKKPDAEGYLPVRLMQEDNANELKQIFRVQRVPADEWKPLFRSVFYAVSPKGSAEQRVGQDPLAPEQARALKASLAFQEYRIANVITNLRIKDASAELRKLTVDEKQSIYDQLVSPSSEDITWSDLCDFLGFKRSQLKGVGSLTEDGEERISSRPPRLTSVQRIYESDNKIRKPLVAWWKSASDNEHEAMIRLLSNTVDIDKVREDVAYASAIEFIDGLDDDALTKLDSVDLPSGRAAYSVETLQKLTRQMLTTDDDLHEARKTLFNVTDSWRPPADPIGEPLGNPSVDRVLKNVNRYLMNCQQRWGNPVSVNIEHVRSSFSSVAFARKDKREYEKNNEKRSIFRSSLSEQLRADEQMEKVRESDLRRLEAIQRQNGQCLYCGRTITFRTCEMDHIVPRKGVGSTNTRTNFAAVCAECNRMKSNTPFAIWARSEDAQTRGVSLAEAKKRVTMFTFNPKSYAPREVKAFKQAVIARLQQTEDDAAIDNRSIESVAWMADELHRRIDWYFNAKQYVNSASIDDAEAETMKTTVSVFQGRVTASARRAAGIEGKIHFIGQQSKTRLDRRHHAVDASVIAMMNTAAAQTLMERESLRESQRLIGLMPGERSWKEYPYEGTSRYESFHLWLDNMDVLLELLNDALDNDRIAVMQSQRYVLGNSIAHDATIHPLEKVPLGSAMSADLIRRASTPALWCALTRLPDYDEKEGLPEDSHREIRVHDTRYSADDEMGFFASQAAQIAVQEGSADIGSAIHHARVYRCWKTNAKGVRKYFYGMIRVFQTDLLRACHDDLFTVPLPPQSISMRYGEPRVVQALQSGNAQYLGSLVVGDEIEMDFSSLDVDGQIGEYLQFFSQFSGGNLAWKHWVVDGFFNQTQLRIRPRYLAAEGLAKAFSDDVVPDGVQKIVTKQGWLPPVNTASKTAVRIVRRNAFGEPRLSSAHHMPCSWQWRHE

SEQ ID NO: 66 - protein, 1270 aa, Mycoplasma gallisepticum
  CRISPR-associated endonuclease
  ref <308>: DATABASE ACCESSION NUMBER: NP_853456, NCBI Gene Database
  ref <309>: DATABASE ENTRY DATE: 2013-06-27
MNNSIKSKPEVTIGLDLGVGSVGWAIVDNETNIIHHLGSRLFSQAKTAEDRRSFRGVRRLIRRRKYKLKRFVNLIWKYNSYFGFKNKEDILNNYQEQQKLHNTVLNLKLEALNAKIDPKALSWILHDYLKNRGHFYEDNRDFNVYPTEELANYFDEFGYYKGIIDSKNDDDDKLEEGLTKYKFSNQHWLEEVKKVLSNQTGLPEKFKEEYESLFSYVRNYSEGPGSINSVSPYGIYHLDEKEGKVVQKYNNIWDKTIGKCSIFPDEYRAPKNSPIAMIFNEINELSTIRSYSIYLTGWFINQEFKKAYLNKLLDLLIKTNSEKPIDARQFKKLREETIAESIGKETLKDVESEEKLEKDDHKWKLKGLKLNTNGKIQYNDLSSLAKFVHKLKQHLKLDFLLEDQYTPLDKINFLQSLYVYLGKHLRYSNRVDSANLKEFSDSSRLFERVLQEQKDGLFKLFEQTDKDDEKILTQTHSLSTKAMLLAITRMTNLDNDEDNQKNNDKGWNFEAIKNFDQKFIDITKTNNNLSLKQDKRYLDDQFINDAILSPGVKRILREATKVFNAILKQFSEEYDVTKVVIELARELSEEKELENTKNYKKLIKKNGDKISEGLKALGIAEDKIEEILKSPTKSYKVLLWLQQDHIDPYSQKEIAFDDILTKTEKTEIDHIIPYSISFDDSSSNKLLVLAESNQAKSNQTPYEFINSGKAEITWEVYEAYCHKFKNGDSSLLDSTQRSKKFAKMMKTDTSSKYDIGFLARNLNDTRYATIVFRDALKDYANNHLVEDKPMFKVVCINGGVTSFLRKNFDPKSWYAKKDRDKNIHHAVDASIISIFSNETKTLFNQLTKFADYKLFKNTDGSWKKIDPKTGVVSEVTDENWKQIRVRNQVSEIAKVIDKYIQDSNIERKARYSRKIENKTNISLFNDTVYSAKKVGYEDQIKRKNLKTLDIHESAEENKNSKVKKQFVYRKLVNVSLLNNDKLADLFAEKEDILMYRANPWVINLAEQIFNEYTENKKIKSQNVFEKYMLDLTKEFPEKFSEAFVKSMIRNKTAIIYNVEKDVVHRIKRLKILSSELKENKWSNVIIRSKNESGTKLSYQDTINSIALMIMRSIDPTAKKQYIRVPLNTLNLHLGDQDFDLHNIDAYLKKPKFVKYLKANEIGDEYKPWRVLTSGTLLIHKKDKKLMYISSFQNLNDLIEIKNLIETEYKENVDSDPKKKKKASQILRSLSVILNDYILLDAKYNFDILGLSKNKIDEILNSKLDLDKIAK

SEQ ID NO: 67 - protein, 1195 aa, Elusimicrobium minutum
  CRISPR-associated endonuclease
  ref <308>: DATABASE ACCESSION NUMBER: YP_001875142, NCBI Gene Database
  ref <309>: DATABASE ENTRY DATE: 2013-06-10
MQKNINTKQNHIYIKQAQKIKEKLGDKPYRIGLDLGVGSIGFAIVSMEENDGNVLLPKEIIMVGSRIFKASAGAADRKLSRGQRNNHRHTRERMRYLWKVLAEQKLALPVPADLDRKENSSEGETSAKRFLGDVLQKDIYELRVKSLDERLSLQELGYVLYHIAGHRGSSAIRTFENDSEEAQKENTENKKIAGNIKRLMAKKNYRTYGEYLYKEFFENKEKHKREKISNAANNHKFSPTRDLVIKEAEAILKKQAGKDGFHKELTEEYIEKLTKAIGYESEKLIPESGFCPYLKDEKRLPASHKLNEERRLWETLNNARYSDPIVDIVTGEITGYYEKQFTKEQKQKLFDYLLTGSELTPAQTKKLLGLKNTNFEDIILQGRDKKAQKIKGYKLIKLESMPFWARLSEAQQDSFLYDWNSCPDEKLLTEKLSNEYHLTEEEIDNAFNEIVLSSSYAPLGKSAMLIILEKIKNDLSYTEAVEEALKEGKLTKEKQAIKDRLPYYGAVLQESTQKIIAKGFSPQFKDKGYKTPHTNKYELEYGRIANPVVHQTLNELRKLVNEIIDILGKKPCEIGLETARELKKSAEDRSKLSREQNDNESNRNRIYEIYIRPQQQVIITRRENPRNYILKFELLEEQKSQCPFCGGQISPNDIINNQADIEHLFPIAESEDNGRNNLVISHSACNADKAKRSPWAAFASAAKDSKYDYNRILSNVKENIPHKAWRFNQGAFEKFIENKPMAARFKTDNSYISKVAHKYLACLFEKPNIICVKGSLTAQLRMAWGLQGLMIPFAKQLITEKESESFNKDVNSNKKIRLDNRHHALDAIVIAYASRGYGNLLNKMAGKDYKINYSERNWLSKILLPPNNIVWENIDADLESFESSVKTALKNAFISVKHDHSDNGELVKGTMYKIFYSERGYTLTTYKKLSALKLTDPQKKKTPKDFLETALLKFKGRESEMKNEKIKSAIENNKRLFDVIQDNLEKAKKLLEEENEKSKAEGKKEKNINDASIYQKAISLSGDKYVQLSKKEPGKFFAISKPTPTTTGYGYDTGDSLCVDLYYDNKGKLCGEIIRKIDAQQKNPLKYKEQGFTLFERIYGGDILEVDFDIHSDKNSFRNNTGSAPENRVFIKVGTFTEITNNNIQIWFGNIIKSTGGQDDSFTINSMQQYNPRKLILSSCGFIKYRSPILKNKEG

SEQ ID NO: 68 - protein, 1125 aa, Francisella tularensis
  CRISPR-associated endonuclease
  ref <308>: DATABASE ACCESSION NUMBER: YP_001122287, NCBI Gene Database
  ref <309>: DATABASE ENTRY DATE: 2013-06-10
MNVKILPIAIDLDVKNTGVFSAFYQKGTSLEKLDNKNGKVYELSKDSYTLLMNNRTARRHQRRGIDRKQLVKRLFKLVWTEQLNLEWDKDTQQAISFLFNRRGFSFITDGYSTEYLNIVPEQVKAILMDIFDDYNGEDDLDSYLKLATEQESKISEIYNKLMQKILEFKLRKLCTDIKDDKVSTKTLKEITSYEFELLADYLANYSESLKIQKFSYTDKQGNLKELSYYHHDKYNIQEFLKRHATINDEILDTLLTDDFDIWNFNFEKFDFDKNEEKLQNQEDKDHTQAHLHHFVFAVNKIKSEMASGGRHRSQYFQEITNVLDENNHQEGYLKNFCENLHNKKYSNLSVKNLVNLVGNLSNLELKPLRKYFNDKIHAKADHWDEQKFTETYCHWILGEWRVGVKDQDKKDGAKYSYKDLCNELKQKVTKAGLIDFLLELDPCRTIPPYLDNNNRKPPKCQSLILNPKFLDNQYPNWQQYLQELKKLQSIQDYLDSFETDLKDLKSSKDQPYFVEYKSSNQQMASGQRDYKDLDARILQFIFDRVKASDELLLNEIYFQAKKLKQKASSELEKLESSKKLDEVIANSQLSQILKSQHTNGIFEQGTFLHLVCKYYKQRQRARDSRLYIMPEYRYDKKLDKYNNTGRFDDNNQLLTYCNHKPRQKRYQLLNDLAGVLQVSRNQLLSSVEEWFQQAQRVGEISKSQDEQIFEWLKSFKIASYCKAAVEMQKQYRGTLKNAIQTAIFRQSENINKNKNKNTGNQQQALSENSKDVKSLTADEKKLLKLIENIAKASQKIGESLGLNDKQIKKFNSIYSFAQIQQIAFAERKGNANTCAVCSADNAHRMQQIKITELVEDNKDNIILSAKAQRLPAIPTRIVDGAVKKMATILAKNIVDDNWQNIKQVLSAKHQLHIPIITESNAFEFEPALADVKGKSLKDRRKKALERISPENIFKDKNNRIKEFAKGISAYSGANLTDGDFDGAKEELDHIIPRSHKKYGTLNDEANLICVTRDDNKNIFAIDTSKWFEIETPSDLRDIGVATIQYKIDNNSRPKVRVKLDYVIDDDSKINYFMNHSLLKSRYPDKVLEILKQSTIIEFESSGFNKTIKEMLGMTLAGIYNETSNN

SEQ ID NO: 69 - protein, 1130 aa, Streptococcus macedonicus
  CRISPR-associated endonuclease
  ref <308>: DATABASE ACCESSION NUMBER: YP_005095062, NCBI Gene Database
  ref <309>: DATABASE ENTRY DATE: 2013-06-11
MTNGKILGLDIGIASVGVGIIEAKTGKVVHANSRLFSAANAENNAERRGFRGSRRLNRRKKHRVKRVRDLFEKYGIVTDFRNLNLNPYELRVKGLTEQLTNEELFAALRTISKRRGISYLDDAEDDSTGSTDYAKSIDENRRLLKTKTPGQIQLERLEKYGQLRGNFTVYDENGEAHRLINVFSTSDYEKEARKILETQADYNKKITAEFIDDYVEILTQKRKYYHGPGNEKSRTDYGRFRTDGTTLENIFGILIGKCNFYPDEYRASKASYTAQEYNFLNDLNNLKVPTETGKLSTEQKESLVEFAKNTAILGPAKLLKEIAKILDCKVDEIKGYREDDKGKPDLHTFEPYRKLKFNLDSVNIDYLSREVLDKLADILTLNTEREGIEDAIKRNLPNQFTEEQISEIINVRKSQSTAFNKGWHSFSAKLMNELIPELYATSDEQMTILTRLEKFKVKKKSSKNIKTIDEKEITDEIYNPVVAKSVRQTIKIINAAVKKYGDFDKIVIEMPRDKNADDEKKFINKRNKENKKEKDDALKRAAYLYNGTDKLPDEVFHGNKQLETKIRLWYQQGERCLYSGKPIPIQELVHNSNNFEIDHILPLSLSFDDSLANKVLVYSWTNQEKGQKTPYQVIDSMDAAWSFREMKEYVLKQKGLGKKKRDYLLTTENIDKIEVKKKFIERNLVDTRYASRVVLNSLQSALRELGKDTKVSVVRGQFTSQLRRKWKIDKSRETYHHHAVDALIIAASSQLKLWEKQDNPMFVDYGNNQVVDKQTGEILSVSDNEYKELVFQPPYQGFVNTISSKGFEDEILFSYQVDSKYNRKVSDATIYSTRKAKIGKDKKEETYVLGKIKDIYSQNGFDTFVKKYNKDKTQFLMYQKDPLTWENVIEVILGDYPTTKKSEDGKNDVKCNPFEEYRRENGLICKYSKKGKGTPIKSLKYYDKKLGNCIDITPEESRNKVILQSINPWRADVYFNPETLKYELMGLKYSDLSFEKGTGNYHISQEKYDAIKEKEGIGKKSEFKFTLYRNDLILIKDIASGEQEIYRFLSRTMPNVNHYVELKPYDKEKFDNVQELVEALGEADKVGRCIKSLNKPNISIYKVRTDVLGNKYFVKKEGDKPKLDFKNNKK

SEQ ID NO: 70 - protein, 1122 aa, Streptococcus suis
  CRISPR-associated endonuclease
  ref <308>: DATABASE ACCESSION NUMBER: YP_004401929, NCBI Gene Database
  ref <309>: DATABASE ENTRY DATE: 2013-07-06
MSNGKILGLDIGIASVGVGVIDAQTGEIIHASSRIFPSANAANNAERRTFRGSRRLIRRKKHRIKRLDDLFNDFHINLDGEMSTDNPYVLRVKGLSQKLTVEELYISIKNIMKRRGISYLDDAESDNEAGRSDYAKAIERNRQLLTSKTPGEIQLERLEKYGQLRGNFTIIDEEGQSQQIINVFSTSDYVKEVEKILDCQKMYHKFISDEFCDKLIELLREKRKYYVGPGNEKSRTDYGIYRTDGTTLENLFGILIGKCTFYPDQYRSSRASYTAQEFNFLNDLNNLTVPTETKKLSQEQKEFLVNYAKETSVLGAGKILQQIAKLADCKVEDIRGYRLDNKDKPELHTFETYRAMKGLVPLVDIGVLSREQLDILADILTLNTDFEGIREALKKQLPNVFDEKQVKGLASFRKSKSQLFAKGWHNLSQKIMLEVIPELYATSDEQMTILTRLGKFEKSSVAEYPSSINVDEITDEIYNPVVAKSIRQTIKIINASIKKWGEFDQIVIEMPRDRNEDEEKKRIADGQKANAKEKADSILRAAELYCAGKVLPDYVYNGHNQLATKIRLWYQQGERCIYTGQPISIHDLIHNQNQYEIDHILPLSLTFDDSLSNKVLVLATANQEKAQRTPYNYLKSATSAWSYREFKDYVTKRKGIGKKKCEYLTFEEDINGFEVRSKFIQRNLVDTRYASKVILNALQDYFKISGIQTKVSVVRGQFTSQLRHKWGIEKTRETYHHHAVDALIIAASSQLRLWKKQESPLVVDYQEGRQVDLETGEILELTDEQYKELVYQPPYQGFVNTISSSAFDNEILFSYQVDSKVNRKISDATIYATRNAQLGKDKTEGIYVLGKIKDIYTQAGYEAFLKRYTKDKTSFLMYHKDLDTWEKVIEIILRDYREYDEKGKEIGNPFERYRRENGYVKKYSRKGNGTAIKSLKYYDNKLGNHIDITPENSRNAVVLQSLKPWRTDVYFNKETGKYEFLGIKYSDLSFEKGTGEYGISQEKYDSIKIAEGVAKKSIFKFTLYKQDLLFIKDIENNFGKLLRFTSKNDTSKHYVELKPYDKNKFGTEEPLLPVLGNVAKSGQCIKGLNKSNISIYKVRTDILGYRHFIKQEGEHPQLKFKK

SEQ ID NO: 71 - protein, 1130 aa, Streptococcus gallolyticus
  CRISPR-associated endonuclease
  ref <308>: DATABASE ACCESSION NUMBER: YP_003430854, NCBI Gene Database
  ref <309>: DATABASE ENTRY DATE: 2013-06-10
MTNGKILGLDIGIASVGVGIIEAKTGKVVHANSRLFSAANAENNAERRGFRGSRRLNRRKKHRVKRVRDLFEKYEIVTDFRNLNLNPYELRVKGLTEQLTNEELFAALRTISKRRGISYLDDAEDDSTGSTDYAKSIDENRRLLKTKTPGQIQLERLEKYGQLRGNFTVYDENGEAHRLINVFSTSDYEKEARKILETQADYNKKITAEFIDDYVEILTQKRKYYHGPGNEKSRTDYGRFRTDGTTLENIFGILIGKCSFYPDEYRASKASYTAQEYNFLNDLNNLKVPTETGKLSTEQKEALVEFAKSTATLGPAKLLKEIAKILDCKVDEIKGYREDDKGKPDLHTFEPYRKLKFNLDSVNIDDLSREVLDKLADILTLNTEREGIEDAIRHNLPNQFTEGQISEIIKVRKSQSTAFNKGWHSFSAKLMNELIPELYATSDEQMTILTRLEKFKVNKKSSKNTKTIDEKEVTDEIYNPVVAKSVRQTIKIINAAVKKYGDFDKIVIEMPRDKNADDEKKFIDKRNKENKKEKDDALKRAAYLYNGTDKLPDEVFHGNKQLETKIRLWYQQGERCLYSGKPIPIQELVHNSNNFEIDHILPLSLSFDDSLANKVLVYAWTNQEKGQKTPYQVIDSMDAAWSFREMKDYVLKQKGLGKKKRDYLLTTENIDKIEVKKKFIERNLVDTRYASRVVLNSLQSALRELGKDTKISVIRGQFTSQLRRKWKIDKSRETYHHHAVDALIIAASSQLKLWEKQDNPMFVDYGNNQVVDKQTGEILSVSDDEYKELVFQPPYQGFVNMISSKGFEDEILFSYQVDSKYNRKVSDATIYSTRKAKIGKDKKEETYVLGKIKDIYSQNGFDTFIKKYNKDKTQFLMYQKDPLTWENVIEVILRDYPTTKKSEDGKNDVKCNPFEEYRRENGLVCKYSKKGKGTPIKSLKYYDKKLGNCIDITPEGSKNEVVLQSLNPWRADVYFNPETLKYELLGLKYSDLSFEKGTGKYHISQEKYDVIKEKEGIGKKSEFKFTLYRNDLILIKDTASGEQEIYRFLSRTMPNVKHYAELKPYDKEKFDNVQELVEALGEADKVGRCIKGLNKSNLSIYKVRTDVLGNKYFVKKEGDKPKLDFKNNKK

SEQ ID NO: 72 - protein, 1371 aa, Streptococcus gallolyticus
  CRISPR-associated endonuclease
  ref <308>: DATABASE ACCESSION NUMBER: YP_003430861, NCBI Gene Database
  ref <309>: DATABASE ENTRY DATE: 2013-06-10
MTEKNYSIGLDIGTNSVGWAVITDDYKVPAKKMKVLGNTDKKYIKKNLLGALLFDNGETAEATRLKRTARRRYTRRKNRLRYLQEIFAEEMAKVDESFFYRLDESFLTTDDKDFERHPIFGNKADEIKYHQEFPTIYHLRKHLADSHEKADLRLIYLALAHMIKFRGHFLIEGELNAENTDVQKLFEAFVEVYDRTFDDSNLSEITVDASSILTEKFSKSRRLENLIKHYPTEKKNTLFGNLVALALGLQPNFKTSFKLSEDAKLQFSKDTYEEDLEELIGKIGDEYADLFTSAKNLYDAILLSGILTVADNTTKAPLSASMIKRYNEHQVDLKKLKEFIKNNASDKYDEIFNDKDKNGYAGYIENGVKQDEFYKYLKTTLSKIDGSDYFLDKIEREDFLRKQRTFDNGSIPHQIHLQEMHAILRRQGEHYAFLKENQAKIEKILTFRIPYYVGPLARKNSRFAWAEYHSDEKITPWNFDEIIDKEKSAEKFITRMTLNDLYLPEEKVLPKHSLVYETYTVYNELTKVKYVNEQGKSNFFDANMKQEIFEHVFKENRKVTKDKFLNYLNKEFPEYRIQDLIGLDKENKSFNASLGTYHDLKKILDKSFLDDKTNETIIEDIIQTLTLFEDRDMIRQRLQKYSDIFTPQQLKKLERRHYTGWGRLSYKLINGIRNKENGKSILDYLIDDGYANRNFMQLISDDTLPFKQIIKDAQIIGDIDDVTSVVRELPGSPAIKKGILQSVKIVDELVKVMGHNPDNIVIEMARENQTTNRGRNQSQQRLKKLQDSLKELGSNILNEEKPSYIEGKVENNHLQDDRLFLYYIQNGKDMYTGDELDIDHLSDYDIDHIIPQAFIKDDSIDNRVLTSSAKNRGKSDDVPSLDIVHDRKADWIRLYKSGLISKRKFDNLTKAERGGLTENDKAGFIKRQLVETRQITKHVAQILDSRFNTERDENDKVIRNVKVITLKSNLVSQFRKDFKFYKVREINDYHHAHDAYLNAVVGTALLKKYPKLAPEFVYGEYKKYDIRKFITSSGDKATAKYFFYSNLMNFFKRVIRYSNGKVVVRPVIECSKDTGEIAWNKQTDFEKVRRVLSYPQVNIVKKVETQTGGFSKESILPKGNSDKLIPRKTKKFRWDTPKYGGFDSPNIAYSVFVIADVEKGKAKKLKTVKELVGISIMERSSFEENPVVFLEKKGYQNVQEDNLIKLPKYSLFEFEGGRRRLLASASELQKGNEVVLSRHLVELLYHAHRVNSFNNSEHLKYVSEHKKEFGEVLSCVENFAKSYVDVEKNLGKIRAVADKIDTFSIEDISISFVNLLTLTALGAPADFNFLGEKIPRKRYTSTKECLNATLIHQSITGLYETRIDLSKLGEE

SEQ ID NO: 73 - protein, 1138 aa, Bifidobacterium dentium
  CRISPR-associated endonuclease
  ref <308>: DATABASE ACCESSION NUMBER: YP_003360699, NCBI Gene Database
  ref <309>: DATABASE ENTRY DATE: 2013-08-27
MLCRCHRRYRIGIDVGLMSVGLAAIEVDETGFPIRILNIQSVIHDGGIDPQLGKKKSISRKAISGVARRTRRMRRRKVVRLRQLDATLESLGFPIVEPDSLDTWEIWLTRAKLASSYIQDDETRKEDVSIALRHIARHRGWRNPYSNVESLFVDVAPSEQYEELRRKAEEKLGTSLSGNPTSAEIVECILKRQVGEVQLRTRSRKGVNGNAVEKEGLLPTKLMQSDNAAEIRRIFKVQRIDDETGRKLLRAVFKACSPKGSVERRVGRDALAPGLPRALKASLAFQEYRIANVLTNLVISEDGTKRKLTIAEKQRVFGFLSSNETDDITWIDVAEKLGLERRQIQGVGCLTADGEERISSTPPRNITALHIHSAKPVIREKLVAWWKAASPTVRETMVELLSNTVDIDRVREDMDYSSAVAFIDSLGDEELTALDSVDLLSGRAAYSRQTLKQLTERMLNTDDDLHEARKAVFGVDDNWKPPVDAISTSVGNPAVDRVLKIVNRYLLACQKRWRNPQSVQIEHVRESFSSVAKAKETERVQGERARYRNDLRRELCEQEGLNKIRESDIRRWESVQRQNGTCLYCGSPITFRTCEMDHIVPRKGVGSTNTRVNLAAACAACNKLKSNTAFSVWARTEGAANRKVSQRDAIERVKTFIFNKSVPPREQRAFKQAVISRLRQAESDPAIDNRSIESVAWMADELHRRIEAYFNQDADVSGNTPATQVWVFQGRVTALARKASGIEGRIHFAGEWKKTRLDRRHHAVDAAVIAMMNHSAAQTLVERDSLRLSQWITRKPETWKNYPFSEGQKKTRFKEWLDCMNALLDLLNDALDSDRVPVTRCQRMSLGNSQAHAATIRKMKRVELFSPMDADLIRRASTPALYCALTRLPEYSPEKGLPENRGREIVLNGRHIRSTETVDFFASGAAQLMVRNGSAEIGDSIHHMRIYRYRKTGAKSQEYVYGMIRVFQIDLLHASSENLFAVQLPSQSVSVRYGDKNVVQAIQEGRAEYLGHIVPNDEILISYEGVRMKDSEKIGAYANDFSGTASELAQRRHWVVVGSDVSKLALRPSYLSEEGLENSGSESERLSKQTRKVIEGKGWVVAVNILAKYHPVVIRRNALGEPRFRTNSGMPVSWRWDR

SEQ ID NO: 74 - protein, 1082 aa, Neisseria meningitidis
  CRISPR-associated endonuclease
  ref <308>: DATABASE ACCESSION NUMBER: YP_003082577, NCBI Gene Database
  ref <309>: DATABASE ENTRY DATE: 2013-06-10
MAAFKPNPINYILGLDIGIASVGWAMVEIDEEENPIRLIDLGVRVFERAEVPKTGDSLAMVRRLARSVRRLTRRRAHRLLRARRLLKREGVLQAADFDENGLIKSLPNTPWQLRAAALDRKLTPLEWSAVLLHLIKHRGYLSQRKNEGETADKELGALLKGVADNAHALQTGDFRTPAELALNKFEKESGHIRNQRGDYSHTFSRKDLQAELILLFEKQKEFGNPHISGGLKEGIETLLMTQRPALSGDAVQKMLGHCTFEPAEPKAAKNTYTAERFIWLTKLNNLRILEQGSERPLTDTERATLMDEPYRKSKLTYAQARKLLGLEDTAFFKGLRYGKDNAEASTLMEMKAYHAISRALEKEGLKDKKSPLNLSPELQDEIGTAFSLFKTDEDITGRLKDRIQPEILEALLKHISFDKFVQISLKALRRIVPLMEQGKRYDEACAEIYGDHYGKKNTEEKIYLPPIPADEIRNPVVLRALSQARKVINGVVRRYGSPARIHIETAREVGKSFKDRKEIEKRQEENRKDREKAAAKFREYFPNFVGEPKSKDILKLRLYEQQHGKCLYSGKEINLGRLNEKGYVEIDHALPFSRTWDDSFNNKVLVLGSENQNKGNQTPYEYFNGKDNSREWQEFKARVETSRFPRSKKQRILLQKFDEDGFKERNLNDTRYVNRFLCQFVADRMRLTGKGKKRVFASNGQITNLLRGFWGLRKVRAENDRHHALDAVVVACSTVAMQQKITRFVRYKEMNAFDGKTIDKETGEVLHQKTHFPQPWEFFAQEVMIRVFGKPDGKPEFEEADTPEKLRTLLAEKLSSRPEAVHEYVTPLFVSRAPNRKMSGQGHMETVKSAKRLDEGVSVLRVPLTQLKLKDLEKMVNREREPKLYEALKARLEAHKDDPAKAFAEPFYKYDKAGNRTQQVKAVRVEQVQKTGVWVRNHNGIADNATMVRVDVFEKGDKYYLVPIYSWQVAKGILPDRAVVQGKDEEDWQLIDDSFNFKFSLHPNDLVEVITKKARMFGYFASCHRGTGNINIRIHDLDHKIGKNGILEGIGVKTALSFQKYQIDELGKEIRPCRLKKRPPVR

SEQ ID NO: 75 - protein, 1348 aa, Streptococcus equi
  CRISPR-associated endonuclease
  ref <308>: DATABASE ACCESSION NUMBER: YP_002123679, NCBI Gene Database
  ref <309>: DATABASE ENTRY DATE: 2013-06-27
MKKPYTIALDIGTNSVGWVVVTDDYRVPTKKMKVLGNTERKTIKKNLIGALLFDSGDTAEGTRLKRTARRRYTRRKNRLRYLKEIFTEEMAKVDDGFFQRLEDSFYVLEDKEGNKHPIFANLADEVAYHKKYPTIYHLRKELVDNPQKADLRLIYLAVAHIIKFRGHFLIEGTLSSKNNNLQKSFDHLVDTYNLLFEEQRLLTEGINAKELLSAALSKSKRLENLISLIPGQKKTGIFGNIIALSLGLTPNFKANFGLSKDVKLQLAKDTYADDLDSLLAQIGDQYADLFLAAKNLSDAILLSDILTESDEITRAPLSASMVKRYREHHKDLVTLKTLIKDQLPEKYQEIFLDKTKNGYAGYIEGQVSQEEFYKYLKPILARLDGSEPLLLKIDREDFLRKQRTFDNGSIPHQIHLEELHAILRRQEVFYPFLKDNRKKIESLLTFRIPYYVGPLARGHSRFAWVKRKFDGAIRPWNFEEIVDEEASAQIFIEKMTKNDLYLPNEKVLPKHSLLYETFTVYNELTKVKYATEGMTRPQFLSADQKQAIVDLLFKTNRKVTVKQLKENYFKKIECWDSVEITGVEDSFNASLGTYHDLLKIIQDKDFLDNPDNQKIIEDIILTLTLFEDKKMISKRLDQYAHLFDKVVLNKLERHHYTGWGRLSGKLINGIRDKQSGKTILDFLKADGFANRNFMQLIHDSELSFIDEIAKAQVIGKTEYSKDLVGNLAGSPAIKKGISQTIKIVDELVKIMGYLPQQIVIEMARENQTTAQGIKNARQRMRKLEETAKKLGSNILKEHPVDNSQLQNDKRYLYYLQNGKDMYTGDDLDIDYLSSYDIDHIIPQSFIKNNSIDNKVLTSQGANRGKLDNVPSEAIVRKMKGYWQSLLRAGAISKQKFDNLTKAERGGLTQVDKAGFIQRQLVETRQITKHVAQILDSRFNTEFDDHNKRIRKVHIITLKSKLVSDFRKEFGLYKIRDINHYHHAHDAYLNAVVAKAILGKYPQLAPEFVYGDYPKYNSFKERQKATQKMLFYSNILKFFKDQESLHVNSDGEEIWNANKHLPIIKNVLSIPQVNIVKKTEVQTGGFYKESILSKGNSDKLIPRKNNWDTRKYGGFDSPTVAYSVLVIAKMEKGKAKVLKPVKEMVGITIMERTAFEENPVVFLEARGYREIQEHLIIKLPKYSLFELENGRRRLLASASELQKGNELFLPVDYMTFLYLAAHYHELTGSSEDVLRKKYFVDRHLHYFDDIIQMINDFAERHILASSNLEKINHTYHNNSDLPVNERAENIINVFTFVALGAPAAFKFFDATIDRKRYTSTKEVLNATLIHQSVTGLYETRIDLSQLGEN

SEQ ID NO: 76 - protein, 1136 aa, Streptococcus gordonii
  CRISPR-associated endonuclease
  ref <308>: DATABASE ACCESSION NUMBER: YP_001450662, NCBI Gene Database
  ref <309>: DATABASE ENTRY DATE: 2013-06-10
MNGLVLGLDIGIASVGVGILEKDTGKIIHASSRLFPAATADNNVERRSNRQGRRLNRRKKHRSVRLQDLFEGYGLLTDFSKVSMNLNPYQLRVQGMENQLTNEELFVALKNIVKRRGISYLDDASEDGGTVSSDYGKAVEENRKLLAEKTPGQIQLERFEKYGQLRGDFTVEENGEKHRLINVFSTSAYRKEAERILRKQQEFNSKITDEFIEDYLIILTGKRKYYHGPGNEKSRTDYGRFRTDGTTLDNIFGILIGKCTFYTEEYRASKASYTAQEFNLLNDLNNLTVPTETKKLSEEQKKLIIEYAKSAKTLGASTLLKYIAKMIDASVDQIRGYRVDVNNKPEMHTFEVYRKMQSLETIKVEELPRKVLDELAHILTLNTEREGIEEAINSKLKDIFNRDQVLELVQFRKNNSSLFSKGWHNFSIKLMMELIPELYETSEEQMTILTRLGKQRSKETSKRTKYIDEKELTEEIYNPVVAKSVRQAIKIINEATKKYGIFDNIVIEMARENNEEDAKKDYIKRQKANQDEKNAAMEKAAFQYNGKKELPDNIFHGHKELTTKIRLWHQQGEKCLYTGKNIPISDLIHNQYKYEIDHILPLSLSFDDSLSNKVLVLATANQEKGQRTPFQALDSMDDAWSYREFKSYVKDSKLLSNKKKDYLLTEEDISKIEVKQKFIERNLVDTRYSSRVVLNALQDFYKSHQLDTTISVVRGQFTSQLRRKWGIEKSRETYHHHAVDALIIAASSQLRLWKKHSNPLIAYKEGQFVDSETGEIVSLSDEEYKELVFKAPYDHFVDTLRSKKFEDSILFSYQVDSKYNRKISDATIYATRKAKLDKEKKEYTYTLGKIKDIYALGTKTPSKTGFYKFLDLYKTDKSQFLMYQKDRKTWDEVIEKIIEQYRPFKEYDKNGKEVDFNPFEKYRIGNGPIRKYSKKGNGPEIKSLKYYDILLGKHKNITPDGSRNTVALLSLNPWRTDVYYNSETKKYEFLGLKYADLCFEEGGAYGISEVKYKKIREKEGIGKNSEFKFTLYKNDLILIKDTETNCQQFFRFWSRTGKDNPKSFEKHKIELKPYEKAKFEKGEELKVLGKVPPSSNQFQKNMQIENLSIYKVKTDILGNKHFIKKEGDEPKLKFKK

SEQ ID NO: 77 - protein, 1368 aa, Streptococcus pyogenes
  CRISPR-associated endonuclease
  ref <308>: DATABASE ACCESSION NUMBER: YP_280216, NCBI Gene Database
  ref <309>: DATABASE ENTRY DATE: 2013-08-28
MDKKYSIGLDIGTNSVGWAVITDDYKVPSKKFKVLGNTDRHSIKKNLIGALLFDSGETAEATRLKRTARRRYTRRKNRICYLQEIFSNEMAKVDDSFFHRLEESFLVEEDKKHERHPIFGNIVDEVAYHEKYPTIYHLRKKLVDSTDKADLRLIYLALAHMIKFRGHFLIEGDLNPDNSDVDKLFIQLVQTYNQLFEENPINASGVDAKAILSARLSKSRRLENLIAQLPGEKKNGLFGNLIALSLGLTPNFKSNFDLAEDAKLQLSKDTYDDDLDNLLAQIGDQYADLFLAAKNLSDAILLSDILRLNSEITKAPLSASMIKRYDEHHQDLTLLKALVRQQLPEKYKEIFFDQSKNGYAGYIDGGASQEEFYKFIKPILEKMDGTEELLAKLNREDLLRKQRTFDNGSIPHQIHLGELHAILRRQEDFYPFLKDNREKIEKILTFRIPYYVGPLARGNSRFAWMTRKSEETITPWNFEEVVDKGASAQSFIERMTNFDKNLPNEKVLPKHSLLYEYFTVYNELTKVKYVTEGMRKPAFLSGEQKKAIVDLLFKTNRKVTVKQLKEDYFKKIECFDSVEISGVEDRFNASLGTYHDLLKIIKDKDFLDNEENEDILEDIVLTLTLFEDREMIEERLKTYAHLFDDKVMKQLKRRRYTGWGRLSRKLINGIRDKQSGKTILDFLKSDGFANRNFMQLIHDDSLTFKEDIQKAQVSGQGDSLHEHIANLAGSPAIKKGILQTVKVVDELVKVMGRHKPENIVIEMARENQTTQKGQKNSRERMKRIEEGIKELGSQILKEHPVENTQLQNEKLYLYYLQNGRDMYVDQELDINRLSDYDVDHIVPQSFIKDDSIDNKVLTRSDKNRGKSNNVPSEEVVKKMKNYWRQLLNAKLITQRKFDNLTKAERGGLSELDKAGFIKRQLVETRQITKHVAQILDSRMNTKYDENDKLIREVKVITLKSKLVSDFRKDFQFYKVREINNYHHAHDAYLNAVVGTALIKKYPKLESEFVYGDYKVYDVRKMIAKSEQEIGKATAKYFFYSNIMNFFKTEITLANGEIRKRPLIETNGETGEIVWDKGRDFATVRKVLSMPQVNIVKKTEVQTGGFSKESILPKRNSDKLIARKKDWDPKKYGGFDSPTVAYSVLVVAKVEKGKSKKLKSVKELLGITIMERSSFEKNPIDFLEAKGYKEVRKDLIVKLPKYSLFELENGRKRMLASAGELQKGNELALPSKYVNFLYLASHYEKLKGSPEDNEQKQLFVEQHKHYLDEIIEQISEFSKRVILADANLDKVLSAYNKHRDKPIREQAENIIHLFTLTNLGAPAAFKYFDTTIDRKRYTSTKEVLDATFIHQSITGLYETRIDLSQLGGD

SEQ ID NO: 78 - protein, 1370 aa, Streptococcus gallolyticus
  CRISPR-associated endonuclease
  ref <308>: DATABASE ACCESSION NUMBER: YP_004288385, NCBI Gene Database
  ref <309>: DATABASE ENTRY DATE: 2013-07-06
MTKKNYSIGLDIGTNSVGWAVITDDYKVPAKKMKVLGNTDKKYIKKNLLGALLFDSGETAEATRLKRTARRRYTRRKNRLRYLQEIFAEEMTKVDESFFYRLDESFLTTDEKDFERHPIFGNKAEEDAYHQKFPTIYHLRNYLADSSEKADLRLVYLALAHMIKYRGHFLIEGKLNAENTDVQKLFTDFVGVYDRTFDDSHLSEITVDVASTLTEKISKSRRLENLIKYYPTEKKNTLFGNLIALALGLQPNFKMNFKLSEDAKLQFSKDTYEEDLEELLGKIGDDYADLFTSAKNLYDAILLSGILTVDDNSTKAPLSASMIKRYVEHHEDLEKLKEFIKANKSELYHDIFKDKNKNGYAGYIENGVKQDEFYKYLKNTLSKIDGSDYFLDKIEREDFLRKQRTFDNGSIPHQIHLQEMHAILRRQGDYYPFLKEKQDRIEKILTFRIPYYVGPLVRKDSRFAWAEYRSDEKITPWNFDKVIDKEKSAEKFITRMTLNDLYLPEEKVLPKHSHVYETYAVYNELTKIKYVNEQGKESFFDSNMKQEIFDHVFKENRKVTKEKLLNYLNKEFPEYRIKDLIGLDKENKSFNASLGTYHDLKKILDKAFLDDKVNEEVIEDIIKTLTLFEDKDMIHERLQKYSDIFTANQLKKLERRHYTGWGRLSYKLINGIRNKENNKTILDYLIDDGSANRNFMQLINDDTLPFKQIIQKSQVVGDVDDIEAVVHDLPGSPAIKKGILQSVKIVDELVKVMGDNPDNIVIEMARENQTTNRGRSQSQQRLKKLQSSLKELGSNILNEEKPSYIEDKVENSHLQNDQLFLYYIQNGKDMYTGDELDIDHLSDYDIDHIIPQAFIKDDSIDNRVLTSSAKNRGKSDDVPSLDIVRARKAEWVRLYKSGLISKRKFDNLTKAERGGLTEADKAGFIKRQLVETRQITKHVAQILDARFNTEHDENDKVIRDVKVITLKSNLVSQFRKDFEFYKVREINDYHHAHDAYLNAVVGTALLKKYPKLASEFVYGEYKKYDIRKFITNSSDKATAKYFFYSNLMNFFKTKVKYADGTVFERPIIETNADGEIAWNKQIDFEKVRKVLSYPQVNIVKKVETQTGGFSKESILPKGDSDKLIPRKTKKVYWDTKKYGGFDSPTVAYSVFVVADVEKGKAKKLKTVKELVGISIMERSFFEENPVEFLENKGYHNIREDKLIKLPKYSLFEFEGGRRRLLASASELQKGNEMVLPGYLVELLYHAHRADNFNSTEYLNYVSEHKKEFEKVLSCVEDFANLYVDVEKNLSKIRAVADSMDNFSIEEISNSFINLLTLTALGAPADFNFLGEKIPRKRYTSTKECLTATLIHQSITGLYETRIDLSKLGEE

SEQ ID NO: 79 - protein, 1035 aa, Unknown
  Description of Unknown: Candidatus Puniceispirillum marinum sequence
  CRISPR-associated endonuclease
  ref <308>: DATABASE ACCESSION NUMBER: YP_003552871, NCBI Gene Database
  ref <309>: DATABASE ENTRY DATE: 2013-06-10
MRRLGLDLGTNSIGWCLLDLGDDGEPVSIFRTGARIFSDGRDPKSLGSLKATRREARLTRRRRDRFIQRQKNLINALVKYGLMPADEIQRQALAYKDPYPIRKKALDEAIDPYEMGRAIFHINQRRGFKSNRKSADNEAGVVKQSIADLEMKLGEAGARTIGEFLADRQATNDTVRARRLSGTNALYEFYPDRYMLEQEFDTLWAKQAAFNPSLYIEAARERLKEIVFFQRKLKPQEVGRCIFLSDEDRISKALPSFQRFRIYQELSNLAWIDHDGVAHRITASLALRDHLFDELEHKKKLTFKAMRAILRKQGVVDYPVGFNLESDNRDHLIGNLTSCIMRDAKKMIGSAWDRLDEEEQDSFILMLQDDQKGDDEVRSILTQQYGLSDDVAEDCLDVRLPDGHGSLSKKAIDRILPVLRDQGLIYYDAVKEAGLGEANLYDPYAALSDKLDYYGKALAGHVMGASGKFEDSDEKRYGTISNPTVHIALNQVRAVVNELIRLHGKPDEVVIEIGRDLPMGADGKRELERFQKEGRAKNERARDELKKLGHIDSRESRQKFQLWEQLAKEPVDRCCPFTGKMMSISDLFSDKVEIEHLLPFSLTLDDSMANKTVCFRQANRDKGNRAPFDAFGNSPAGYDWQEILGRSQNLPYAKRWRFLPDAMKRFEADGGFLERQLNDTRYISRYTTEYISTIIPKNKIWVVTGRLTSLLRGFWGLNSILRGHNTDDGTPAKKSRDDHRHHAIDAIVVGMTSRGLLQKVSKAARRSEDLDLTRLFEGRIDPWDGFRDEVKKHIDAIIVSHRPRKKSQGALHNDTAYGIVEHAENGASTVVHRVPITSLGKQSDIEKVRDPLIKSALLNETAGLSGKSFENAVQKWCADNSIKSLRIVETVSIIPITDKEGVAYKGYKGDGNAYMDIYQDPTSSKWKGEIVSRFDANQKGFIPSWQSQFPTARLIMRLRINDLLKLQDGEIEEIYRVQRLSGSKILMAPHTEANVDARDRDKNDTFKLTSKSPGKLQSASARKVHISPTGLIREG

SEQ ID NO: 80 - protein, 1395 aa, Treponema denticola
  CRISPR-associated endonuclease
  ref <308>: DATABASE ACCESSION NUMBER: NP_970941, NCBI Gene Database
  ref <309>: DATABASE ENTRY DATE: 2013-06-10
MKKEIKDYFLGLDVGTGSVGWAVTDTDYKLLKANRKDLWGMRCFETAETAEVRRLHRGARRRIERRKKRIKLLQELFSQEIAKTDEGFFQRMKESPFYAEDKTILQENTLFNDKDFADKTYHKAYPTINHLIKAWIENKVKPDPRLLYLACHNIIKKRGHFLFEGDFDSENQFDTSIQALFEYLREDMEVDIDADSQKVKEILKDSSLKNSEKQSRLNKILGLKPSDKQKKAITNLISGNKINFADLYDNPDLKDAEKNSISFSKDDFDALSDDLASILGDSFELLLKAKAVYNCSVLSKVIGDEQYLSFAKVKIYEKHKTDLTKLKNVIKKHFPKDYKKVFGYNKNEKNNNNYSGYVGVCKTKSKKLIINNSVNQEDFYKFLKTILSAKSEIKEVNDILTEIETGTFLPKQISKSNAEIPYQLRKMELEKILSNAEKHFSFLKQKDEKGLSHSEKIIMLLTFKIPYYIGPINDNHKKFFPDRCWVVKKEKSPSGKTTPWNFFDHIDKEKTAEAFITSRTNFCTYLVGESVLPKSSLLYSEYTVLNEINNLQIIIDGKNICDIKLKQKIYEDLFKKYKKITQKQISTFIKHEGICNKTDEVIILGIDKECTSSLKSYIELKNIFGKQVDEISTKNMLEEIIRWATIYDEGEGKTILKTKIKAEYGKYCSDEQIKKILNLKFSGWGRLSRKFLETVTSEMPGFSEPVNIITAMRETQNNLMELLSSEFTFTENIKKINSGFEDAEKQFSYDGLVKPLFLSPSVKKMLWQTLKLVKEISHITQAPPKKIFIEMAKGAELEPARTKTRLKILQDLYNNCKNDADAFSSEIKDLSGKIENEDNLRLRSDKLYLYYTQLGKCMYCGKPIEIGHVFDTSNYDIDHIYPQSKIKDDSISNRVLVCSSCNKNKEDKYPLKSEIQSKQRGFWNFLQRNNFISLEKLNRLTRATPISDDETAKFIARQLVETRQATKVAAKVLEKMFPETKIVYSKAETVSMFRNKFDIVKCREINDFHHAHDAYLNIVVGNVYNTKFTNNPWNFIKEKRDNPKIADTYNYYKVFDYDVKRNNITAWEKGKTIITVKDMLKRNTPIYTRQAACKKGELFNQTIMKKGLGQHPLKKEGPFSNISKYGGYNKVSAAYYTLIEYEEKGNKIRSLETIPLYLVKDIQKDQDVLKSYLTDLLGKKEFKILVPKIKINSLLKINGFPCHITGKTNDSFLLRPAVQFCCSNNEVLYFKKIIRFSEIRSQREKIGKTISPYEDLSFRSYIKENLWKKTKNDEIGEKEFYDLLQKKNLEIYDMLLTKHKDTIYKKRPNSATIDILVKGKEKFKSLIIENQFEVILEILKLFSATRNVSDLQHIGGSKYSGVAKIGNKISSLDNCILIYQSITGIFEKRIDLLKV

SEQ ID NO: 81 - protein, 1130 aa, Streptococcus pasteurianus
  CRISPR-associated endonuclease
  ref <308>: DATABASE ACCESSION NUMBER: YP_004559470, NCBI Gene Database
  ref <309>: DATABASE ENTRY DATE: 2013-07-06
MTNGKILGLDIGIASVGVGIIEAKTGKVVHANSRLFSAANAENNAERRGFRGSRRLNRRKKHRVKRVRDLFEKYGIVTDFRNLNLNPYELRVKGLTEQLKNEELFAALRTISKRRGISYLDDAEDDSTGSTDYAKSIDENRRLLKNKTPGQIQLERLEKYGQLRGNFTVYDENGEAHRLINVFSTSDYEKEARKILETQADYNKKITAEFIDDYVEILTQKRKYYHGPGNEKSRTDYGRFRTDGTTLENIFGILIGKCNFYPDEYRASKASYTAQEYNFLNDLNNLKVSTETGKLSTEQKESLVEFAKNTATLGPAKLLKEIAKILDCKVDEIKGYREDDKGKPDLHTFEPYRKLKFNLESINIDDLSREVIDKLADILTLNTEREGIEDAIKRNLPNQFTEEQISEIIKVRKSQSTAFNKGWHSFSAKLMNELIPELYATSDEQMTILTRLEKFKVNKKSSKNTKTIDEKEVTDEIYNPVVAKSVRQTIKIINAAVKKYGDFDKIVIEMPRDKNADDEKKFIDKRNKENKKEKDDALKRAAYLYNSSDKLPDEVFHGNKQLETKIRLWYQQGERCLYSGKPISIQELVHNSNNFEIDHILPLSLSFDDSLANKVLVYAWTNQEKGQKTPYQVIDSMDAAWSFREMKDYVLKQKGLGKKKRDYLLTTENIDKIEVKKKFIERNLVDTRYASRVVLNSLQSALRELGKDTKVSVVRGQFTSQLRRKWKIDKSRETYHHHAVDALIIAASSQLKLWEKQDNPMFVDYGKNQVVDKQTGEILSVSDDEYKELVFQPPYQGFVNTISSKGFEDEILFSYQVDSKYNRKVSDATIYSTRKAKIGKDKKEETYVLGKIKDIYSQNGFDTFIKKYNKDKTQFLMYQKDSLTWENVIEVILRDYPTTKKSEDGKNDVKCNPFEEYRRENGLICKYSKKGKGTPIKSLKYYDKKLGNCIDITPEESRNKVILQSINPWRADVYFNPETLKYELMGLKYSDLSFEKGTGNYHISQEKYDAIKEKEGIGKKSEFKFTLYRNDLILIKDIASGEQEIYRFLSRTMPNVNHYVELKPYDKEKFDNVQELVEALGEADKVGRCIKGLNKPNISIYKVRTDVLGNKYFVKKKGDKPKLDFKNNKK

SEQ ID NO: 82 - protein, 897 aa, Corynebacterium ulcerans
  CRISPR-associated endonuclease
  ref <308>: DATABASE ACCESSION NUMBER: YP_004628671, NCBI Gene Database
  ref <309>: DATABASE ENTRY DATE: 2013-07-06
MTNAVANHHVLWAKFDNVSEPYPLLAHLLDTATAATCLFNHWLRKGLRDRLSTELGPDAEKILGFVAGIHDLGKANPYFQAQRRNKKEEWITLRDAIQKAGFPLSNGTSALFEETKEKRRHENITLSILGWEITKFLQVKDVWPQLAIIGHHGNFSAPGFLSDEDDLEDIEDIFDDNGWSPTHELLVSSLLQAVGLEKQPEIKHISPASAILISGLVVLADRIASQSEMASDGLQALQKEELFFHQPEKWIANRKAFCREIIENTVGTYHPWESEAAGIRAVLGDYEPRFTQKAALNAGDGLFNVMETTGAGKTEAALLRHVKRKERLLFFLPTQATTNAIMDRIGKIFDGTPNVASLAHGLAVTEDFYAHPILPVQGSSDDANYKDNGGLYPTEFVRSAGTPRLLAPVCVGTIDQALMGALPSKFNHLRLLALANAHVVVDEVHTMDQYQSELMSGLLEWWSATDTPVTLLTATMPAWQREKFHLSYTGKDPHFKGVFPSLEDWSTPSKNTETSQENIPTEAFTIPINIDKIAHNEIVDSHVQWVIEQRKLFPQARIGIICNTVGRAQSIAEALAHESPIVLHSRMTAGHRKEAATKLEQAIGKKGTANATLVIGTQAIEASLDIDLDLLRTELCPAPSLIQRAGRLWRRLDPQREVRVPGMVGKKLTIAVVDSPSTGQTLPYLRSQLYRVESWLKQRDRIEFPADIQDFIDATTPGLQELFQKVSLPEDCGSAEEREALADDYLNEVASWVTKQRQAGTSRIDFAKHGKPRQVLASDCVVEDFLQITSANNLEESATRLIDYPSISAILCDPTGTIPGAWTDSVEKLIAISAKDSESLRRALRASISIPHSKKFLPITSREIPLSEAKTLLSGYSAVHIQPDEYDLQSGLKGPQK

SEQ ID NO: 83 - protein, 1368 aa, Streptococcus pyogenes
  CRISPR-associated endonuclease
  ref <308>: DATABASE ACCESSION NUMBER: YP_600439, NCBI Gene Database
  ref <309>: DATABASE ENTRY DATE: 2013-08-28
MDKKYSIGLDIGTNSVGWAVITDDYKVPSKKFKVLGNTDRHSIKKNLIGALLFDSGEIAEATRLKRTARRRYTRRKNRICYLQEIFSNEMAKVDDSFFHRLEESFLVEEDKKHERHPIFGNIVDEVAYHEKYPTIYHLRKKLVDSTDKADLRLIYLALAHMIKFRGHFLIEGDLNPDNSDVDKLFIQLVQTYNQLFEENPINASGVDAKAILSARLSKSRRLENLIAQLPGEKKNGLFGNLIALSLGLTPNFKSNFDLAEDAKLQLSKDTYDDDLDNLLAQIGDQYADLFLAAKNLSDAILLSDILRLNSEITKAPLSASMIKRYDEHHQDLTLLKALVRQQLPEKYKEIFFDQSKNGYAGYIDGGASQEEFYKFIKPILEKMDGTEELLAKLNREDLLRKQRTFDNGSIPHQIHLGELHAILRRQEDFYPFLKDNREKIEKILTFRIPYYVGPLARGNSRFAWMTRKSEETITPWNFEEVVDKGASAQSFIERMTNFDKNLPNEKVLPKHSLLYEYFTVYNELTKVKYVTEGMRKPAFLSGEQKKAIVDLLFKTNRKVTVKQLKEDYFKKIECFDSVEISGVEDRFNASLGTYHDLLKIIKDKDFLDNEENEDILEDIVLTLTLFEDREMIEERLKTYAHLFDDKVMKQLKRRRYTGWGRLSRKLINGIRDKQSGKTILDFLKSDGFANRNFMQLIHDDSLTFKEDIQKAQVSGQGDSLHEHIANLAGSPAIKKGILQTVKVVDELVKVMGRHKPENIVIEMARENQTTQKGQKNSRERMKRIEEGIKELGSQILKEHPVENTQLQNEKLYLYYLQNGRDMYVDQELDINRLSDYDVDHIVPQSFIKDDSIDNKVLTRSDKNRGKSDNVPSEEVVKKMKNYWRQLLNAKLITQRKFDNLTKAERGGLSELDKAGFIKRQLVETRQITKHVAQILDSRMNTKYDENDKLIREVKVITLKSKLVSDFRKDFQFYKVREINNYHHAHDAYLNAVVGTALIKKYPKLESEFVYGDYKVYDVRKMLAKSEQEIGKATAKYFFYSNIMNFFKTEITLANGEIRKRPLIETNGETGEIVWDKGRDFATVRKVLSMPQVNIVKKTEVQTGGFSKESILPKRNSDKLIARKKDWDPKKYGGFDSPTVAYSVLVVAKVEKGKSKKLKSVKELLGITIMERSSFEKNPIDFLEAKGYKEVRKDLIIKLPKYSLFELENGRKRMLASAGELQKGNELALPSKYVNFLYLASHYEKLKGSPEDNEQKQLFVEQHKHYLDEIIEQISEFSKRVILADANLDKVLSAYNKHRDKPIREQAENIIHLFTLTNLGAPTAFKYFDTTIDRKRYTSTKEVLDATFIHQSITGLYETRIDLSQLGGD

SEQ ID NO: 84 - protein, 1368 aa, Streptococcus pyogenes
  CRISPR-associated endonuclease
  ref <308>: DATABASE ACCESSION NUMBER: YP_596617, NCBI Gene Database
  ref <309>: DATABASE ENTRY DATE: 2013-08-28
MDKKYSIGLDIGTNSVGWAVITDDYKVPSKKFKVLGNTDRHSIKKNLIGALLFDSGEIAEATRLKRTARRRYTRRKNRICYLQEIFSNEMAKVDDSFFHRLEESFLVEEDKKHERHPIFGNIVDEVAYHEKYPTIYHLRKKLVDSTDKADLRLIYLALAHMIKFRGHFLIEGDLNPDNSDVDKLFIQLVQTYNQLFEENPINASGVDAKAILSARLSKSRRLENLIAQLPGEKKNGLFGNLIALSLGLTPNFKSNFDLAEDAKLQLSKDTYDDDLDNLLAQIGDQYADLFLAAKNLSDAILLSDILRLNSEITKAPLSASMIKRYDEHHQDLTLLKALVRQQLPEKYKEIFFDQSKNGYAGYIDGGASQEEFYKFIKPILEKMDGTEELLAKLNREDLLRKQRTFDNGSIPHQIHLGELHAILRRQEDFYPFLKDNREKIEKILTFRIPYYVGPLARGNSRFAWMTRKSEETITPWNFEEVVDKGASAQSFIERMTNFDKNLPNEKVLPKHSLLYEYFTVYNELTKVKYVTEGMRKPAFLSGEQKKAIVDLLFKTNRKVTVKQLKEDYFKKIECFDSVEISGVEDRFNASLGTYHDLLKIIKDKDFLDNEENEDILEDIVLTLTLFEDREMIEERLKTYAHLFDDKVMKQLKRRRYTVWGRLSRKLINGIRDKQSGKTILDFLKSDGFANRNFMQLIHDDSLTFKEDIQKAQVSGQGDSLHEHIANLAGSPAIKKGILQTVKVVDELVKVMGRHKPENIVIEMARENQTTQKGQKNSRERMKRIEEGIKELGSQILKEHPVENTQLQNEKLYLYYLQNGRDMYVDQELDINRLSDYDVDHIVPQSFIKDDSIDNKVLTRSDKNRGKSDNVPSEEVVKKMKNYWRQLLNAKLITQRKFDNLTKAERGGLSELDKAGFIKRQLVETRQITKHVAQILDSRMNTKYDENDKLIREVKVITLKSKLVSDFRKDFQFYKVREINNYHHAHDAYLNAVVGTALIKKYPKLESEFVYGDYKVYDVRKMLAKSEQEIGKATAKYFFYSNIMNFFKTEITLANGEIRKRPLIETNGETGEIVWDKGRDFATVRKVLSMPQVNIVKKTEVQTGGFSKESILPKRNSDKLIARKKDWDPKKYGGFDSPTVAYSVLVVAKVEKGKSKKLKSVKELLGITIMERSSFEKNPIDFLEAKGYKEVRKDLIIKLPKYSLFELENGRKRMLASAGELQKGNELALPSKYVNFLYLASHYEKLKGSPEDNEQKQLFVEQHKHYLDEIIEQISEFSKRVILADANLDKVLSAYNKHRDKPIREQAENIIHLFTLTNLGAPTAFKYFDTTIDRKRYTSTKEVLDATFIHQSITGLYETRIDLSQLGGD

SEQ ID NO: 85 - protein, 1168 aa, Azospirillum sp.
  CRISPR-associated endonuclease
  ref <308>: DATABASE ACCESSION NUMBER: YP_003448082, NCBI Gene Database
  ref <309>: DATABASE ENTRY DATE: 2013-06-10
MARPAFRAPRREHVNGWTPDPHRISKPFFILVSWHLLSRVVIDSSSGCFPGTSRDHTDKFAEWECAVQPYRLSFDLGTNSIGWGLLNLDRQGKPREIRALGSRIFSDGRDPQDKASLAVARRLARQMRRRRDRYLTRRTRLMGALVRFGLMPADPAARKRLEVAVDPYLARERATRERLEPFEIGRALFHLNQRRGYKPVRTATKPDEEAGKVKEAVERLEAAIAAAGAPTLGAWFAWRKTRGETLRARLAGKGKEAAYPFYPARRMLEAEFDTLWAEQARHHPDLLTAEAREILRHRIFHQRPLKPPPVGRCTLYPDDGRAPRALPSAQRLRLFQELASLRVIHLDLSERPLTPAERDRIVAFVQGRPPKAGRKPGKVQKSVPFEKLRGLLELPPGTGFSLESDKRPELLGDETGARIAPAFGPGWTALPLEEQDALVELLLTEAEPERAIAALTARWALDEATAAKLAGATLPDFHGRYGRRAVAELLPVLERETRGDPDGRVRPIRLDEAVKLLRGGKDHSDFSREGALLDALPYYGAVLERHVAFGTGNPADPEEKRVGRVANPTVHIALNQLRHLVNAILARHGRPEEIVIELARDLKRSAEDRRREDKRQADNQKRNEERKRLILSLGERPTPRNLLKLRLWEEQGPVENRRCPYSGETISMRMLLSEQVDIDHILPFSVSLDDSAANKVVCLREANRIKRNRSPWEAFGHDSERWAGILARAEALPKNKRWRFAPDALEKLEGEGGLRARHLNDTRHLSRLAVEYLRCVCPKVRVSPGRLTALLRRRWGIDAILAEADGPPPEVPAETLDPSPAEKNRADHRHHALDAVVIGCIDRSMVQRVQLAAASAEREAAAREDNIRRVLEGFKEEPWDGFRAELERRARTIVVSHRPEHGIGGALHKETAYGPVDPPEEGFNLVVRKPIDGLSKDEINSVRDPRLRRALIDRLAIRRRDANDPATALAKAAEDLAAQPASRGIRRVRVLKKESNPIRVEHGGNPSGPRSGGPFHKLLLAGEVHHVDVALRADGRRWVGHWVTLFEAHGGRGADGAAAPPRLGDGERFLMRLHKGDCLKLEHKGRVRVMQVVKLEPSSNSVVVVEPHQVKTDRSKHVKISCDQLRARGARRVTVDPLGRVRVHAPGARVGIGGDAGRTAMEPAEDIS

SEQ ID NO: 86 - protein, 1114 aa, Eubacterium rectale
  CRISPR-associated endonuclease
  ref <308>: DATABASE ACCESSION NUMBER: YP_002937591, NCBI Gene Database
  ref <309>: DATABASE ENTRY DATE: 2013-06-27
MNYTEKEKLFMKYILALDIGIASVGWAILDKESETVIEAGSNIFPEASAADNQLRRDMRGAKRNNRRLKTRINDFIKLWENNNLSIPQFKSTEIVGLKVRAITEEITLDELYLILYSYLKHRGISYLEDALDDTVSGSSAYANGLKLNAKELETHYPCEIQQERLNTIGKYRGQSQIINENGEVLDLSNVFTIGAYRKEIQRVFEIQKKYHPELTDEFCDGYMLIFNRKRKYYEGPGNEKSRTDYGRFTTKLDANGNYITEDNIFEKLIGKCSVYPDELRAAAASYTAQEYNVLNDLNNLTINGRKLEENEKHEIVERIKSSNTINMRKIISDCMGENIDDFAGARIDKSGKEIFHKFEVYNKMRKALLEIGIDISNYSREELDEIGYIMTINTDKEAMMEAFQKSWIDLSDDVKQCLINMRKTNGALFNKWQSFSLKIMNELIPEMYAQPKEQMTLLTEMGVTKGTQEEFAGLKYIPVDVVSEDIFNPVVRRSVRISFKILNAVLKKYKALDTIVIEMPRDRNSEEQKKRINDSQKLNEKEMEYIEKKLAVTYGIKLSPSDFSSQKQLSLKLKLWNEQDGICLYSGKTIDPNDIINNPQLFEIDHIIPRSISFDDARSNKVLVYRSENQKKGNQTPYYYLTHSHSEWSFEQYKATVMNLSKKKEYAISRKKIQNLLYSEDITKMDVLKGFINRNINDTSYASRLVLNTIQNFFMANEADTKVKVIKGSYTHQMRCNLKLDKNRDESYSHHAVDAMLIGYSELGYEAYHKLQGEFIDFETGEILRKDMWDENMSDEVYADYLYGKKWANIRNEVVKAEKNVKYWHYVMRKSNRGLCNQTIRGTREYDGKQYKINKLDIRTKEGIKVFAKLAFSKKDSDRERLLVYLNDRRTFDDLCKIYEDYSDAANPFVQYEKETGDIIRKYSKKHNGPRIDKLKYKDGEVGACIDISHKYGFEKGSKKVILESLVPYRMDVYYKEENHSYYLVGVKQSDIKFEKGRNVIDEEAYARILVNEKMIQPGQSRADLENLGFKFKLSFYKNDIIEYEKDGKIYTERLVSRTMPKQRNYIETKPIDKAKFEKQNLVGLGKTKFIKKYRYDILGNKYSCSEEKFTSFC

SEQ ID NO: 87 - protein, 1029 aa, Alicycliphilus denitrificans
  CRISPR-associated endonuclease
  ref <308>: DATABASE ACCESSION NUMBER: YP_004386148, NCBI Gene Database
  ref <309>: DATABASE ENTRY DATE: 2013-07-06
MRSLRYRLALDLGSTSLGWALFRLDACNRPTAVIKAGVRIFSDGRNPKDGSSLAVTRRAARAMRRRRDRLLKRKTRMQAKLVEHGFFPADAGKRKALEQLNPYALRAKGLQEALLPGEFARALFHINQRRGFKSNRKTDKKDNDSGVLKKAIGQLRQQMAEQGSRTVGEYLWTRLQQGQGVRARYREKPYTTEEGKKRIDKSYDLYIDRAMIEQEFDALWAAQAAFNPTLFHEAARADLKDTLLHQRPLRPVKPGRCTLLPEEERAPLALPSTQRFRIHQEVNHLRLLDENLREVALTLAQRDAVVTALETKAKLSFEQIRKLLKLSGSVQFNLEDAKRTELKGNATSAALARKELFGAAWSGFDEALQDEIVWQLVTEEGEGALIAWLQTHTGVDEARAQAIVDVSLPEGYGNLSRKALARIVPALRAAVITYDKAVQAAGFDHHSQLGFEYDASEVEDLVHPETGEIRSVFKQLPYYGKALQRHVAFGSGKPEDPDEKRYGKIANPTVHIGLNQVRMVVNALIRRYGRPTEVVIELARDLKQSREQKVEAQRRQADNQRRNARIRRSIAEVLGIGEERVRGSDIQKWICWEELSFDAADRRCPYSGVQISAAMLLSDEVEVEHILPFSKTLDDSLNNRTVAMRQANRIKRNRTPWDARAEFEAQGWSYEDILQRAERMPLRKRYRFAPDGYERWLGDDKDFLARALNDTRYLSRVAAEYLRLVCPGTRVIPGQLTALLRGKFGLNDVLGLDGEKNRNDHRHHAVDACVIGVTDQGLMQRFATASAQARGDGLTRLVDGMPMPWPTYRDHVERAVRHIWVSHRPDHGFEGAMMEETSYGIRKDGSIKQRRKADGSAGREISNLIRIHEATQPLRHGVSADGQPLAYKGYVGGSNYCIEITVNDKGKWEGEVISTFRAYGVVRAGGMGRLRNPHEGQNGRKLIMRLVIGDSVRLEVDGAERTMRIVKISGSNGQIFMAPIHEANVDARNTDKQDAFTYTSKYAGSLQKAKTRRVTISPIGEVRDPGFKG

SEQ ID NO: 88 - protein, 1029 aa, Alicycliphilus denitrificans; identical to SEQ ID NO: 87
  CRISPR-associated endonuclease
  ref <308>: DATABASE ACCESSION NUMBER: YP_004124877, NCBI Gene Database
  ref <309>: DATABASE ENTRY DATE: 2013-07-06

SEQ ID NO: 89 - protein, 1388 aa, Streptococcus thermophilus
  CRISPR-associated endonuclease
  ref <308>: DATABASE ACCESSION NUMBER: YP_820832, NCBI Gene Database
  ref <309>: DATABASE ENTRY DATE: 2013-08-27
MTKPYSIGLDIGTNSVGWAVTTDNYKVPSKKMKVLGNTSKKYIKKNLLGVLLFDSGITAEGRRLKRTARRRYTRRRNRILYLQEIFSTEMATLDDAFFQRLDDSFLVPDDKRDSKYPIFGNLVEEKAYHDEFPTIYHLRKYLADSTKKADLRLVYLALAHMIKYRGHFLIEGEFNSKNNDIQKNFQDFLDTYNAIFESDLSLENSKQLEEIVKDKISKLEKKDRILKLFPGEKNSGIFSEFLKLIVGNQADFRKCFNLDEKASLHFSKESYDEDLETLLGYIGDDYSDVFLKAKKLYDAILLSGFLTVTDNETEAPLSSAMIKRYNEHKEDLALLKEYIRNISLKTYNEVFKDDTKNGYAGYIDGKTNQEDFYVYLKKLLAEFEGADYFLEKIDREDFLRKQRTFDNGSIPYQIHLQEMRAILDKQAKFYPFLAKNKERIEKILTFRIPYYVGPLARGNSDFAWSIRKRNEKITPWNFEDVIDKESSAEAFINRMTSFDLYLPEEKVLPKHSLLYETFNVYNELTKVRFIAESMRDYQFLDSKQKKDIVRLYFKDKRKVTDKDIIEYLHAIYGYDGIELKGIEKQFNSSLSTYHDLLNIINDKEFLDDSSNEAIIEEIIHTLTIFEDREMIKQRLSKFENIFDKSVLKKLSRRHYTGWGKLSAKLINGIRDEKSGNTILDYLIDDGISNRNFMQLIHDDALSFKKKIQKAQIIGDEDKGNIKEVVKSLPGSPAIKKGILQSIKIVDELVKVMGGRKPESIVVEMARENQYTNQGKSNSQQRLKRLEKSLKELGSKILKENIPAKLSKIDNNALQNDRLYLYYLQNGKDMYTGDDLDIDRLSNYDIDHIIPQAFLKDNSIDNKVLVSSASNRGKSDDVPSLEVVKKRKTFWYQLLKSKLISQRKFDNLTKAERGGLSPEDKAGFIQRQLVETRQITKHVARLLDEKFNNKKDENNRAVRTVKIITLKSTLVSQFRKDFELYKVREINDFHHAHDAYLNAVVASALLKKYPKLEPEFVYGDYPKYNSFRERKSATEKVYFYSNIMNIFKKSISLADGRVIERPLIEVNEETGESVWNKESDLATVRRVLSYPQVNVVKKVEEQNHGLDRGKPKGLFNANLSSKPKPNSNENLVGAKEYLDPKKYGGYAGISNSFTVLVKGTIEKGAKKKITNVLEFQGISILDRINYRKDKLNFLLEKGYKDIELIIELPKYSLFELSDGSRRMLASILSTNNKRGEIHKGNQIFLSQKFVKLLYHAKRISNTINENHRKYVENHKKEFEELFYYILEFNENYVGAKKNGKLLNSAFQSWQNHSIDELCSSFIGPTGSERKGLFELTSRGSAADFEFLGVKIPRYRDYTPSSLLKDATLIHQSVTGLYETRIDLAKLGEG

SEQ ID NO: 90 - protein, 1121 aa, Streptococcus thermophilus
  CRISPR-associated endonuclease
  ref <308>: DATABASE ACCESSION NUMBER: YP_820161, NCBI Gene Database
  ref <309>: DATABASE ENTRY DATE: 2013-08-27
MSDLVLGLDIGIGSVGVGILNKVTGEIIHKNSRIFPAAQAENNLVRRTNRQGRRLARRKKHRRVRLNRLFEESGLITDFTKISINLNPYQLRVKGLTDELSNEELFIALKNMVKHRGISYLDDASDDGNSSVGDYAQIVKENSKQLETKTPGQIQLERYQTYGQLRGDFTVEKDGKKHRLINVFPTSAYRSEALRILQTQQEFNPQITDEFINRYLEILTGKRKYYHGPGNEKSRTDYGRYRTSGETLDNIFGILIGKCTFYPDEFRAAKASYTAQEFNLLNDLNNLTVPTETKKLSKEQKNQIINYVKNEKAMGPAKLFKYIAKLLSCDVADIKGYRIDKSGKAEIHTFEAYRKMKTLETLDIEQMDRETLDKLAYVLTLNTEREGIQEALEHEFADGSFSQKQVDELVQFRKANSSIFGKGWHNFSVKLMMELIPELYETSEEQMTILTRLGKQKTTSSSNKTKYIDEKLLTEEIYNPVVAKSVRQAIKIVNAAIKEYGDFDNIVIEMARETNEDDEKKAIQKIQKANKDEKDAAMLKAANQYNGKAELPHSVFHGHKQLATKIRLWHQQGERCLYTGKTISIHDLINNSNQFEVDHILPLSITFDDSLANKVLVYATANQEKGQRTPYQALDSMDDAWSFRELKAFVRESKTLSNKKKEYLLTEEDISKFDVRKKFIERNLVDTRYASRVVLNALQEHFRAHKIDTKVSVVRGQFTSQLRRHWGIEKTRDTYHHHAVDALIIAASSQLNLWKKQKNTLVSYSEDQLLDIETGELISDDEYKESVFKAPYQHFVDTLKSKEFEDSILFSYQVDSKFNRKISDATIYATRQAKVGKDKADETYVLGKIKDIYTQDGYDAFMKIYKKDKSKFLMYRHDPQTFEKVIEPILENYPNKQINEKGKEVPCNPFLKYKEEHGYIRKYSKKGNGPEIKSLKYYDSKLGNHIDITPKDSNNKVVLQSVSPWRADVYFNKTTGKYEILGLKYADLQFEKGTGTYKISQEKYNDIKKKEGVDSDSEFKFTLYKNDLLLVKDTETKEQQLFRFLSRTMPKQKHYVELKPYDKQKFEGGEALIKVLGNVANSGQCKKGLGKSNISIYKVRTDVLGNQHIIKNEGDKPKLDF

SEQ ID NO: 91 - protein, 876 aa, Corynebacterium diphtheriae
  CRISPR-associated endonuclease
  ref <308>: DATABASE ACCESSION NUMBER: YP_005126356, NCBI Gene Database
  ref <309>: DATABASE ENTRY DATE: 2013-06-11
MNPHEELWAKQKGLAKPYPLLAHLLDSAAVAGALWDHWLRQDLRQMFIEELGSNAREIIQFVVGSHDIGKATPLFQYQKAQKGEVWDSIRYAIDRTGRYQKPLPSSYLVKKTSGGPNRHEQWSSFASKNEYLKPSAAAKENWIGLAIGGHHGRFEPVGYGRHQRKAAEDLAKSGWSAAQQDLLRALEKASGITRASLPSELSPELTLVLSGLTILADRISSTESFVITGARMIDDGTLHLATPIDWLKTRKLDSEKHVAKTVGIYHGWNNHESAIHSILKGYDPRPLQTIALQNQVGLLNLMAPTGNGKTEAAILRHSLKENDRLIFLLPTQATSNAIMRRVQGIYSDTPNAAALAHSLASVEDFYQTPLSVFDDHYDPSKEQFESSMSGGLYPSSFVCSGAARLLAPICIGTVDQALATALPGKWIHLRILALANAHIVIDEVHTLDHYQTALLENILPILAKLKTKITFLTATMPSWQRTKLLTAYGGEDLQIPPTVFPAAETVLPGQFNRTLIDSDSTTIDFTMEETSYDHLVESHVKWHQTTRLNAPHARIGLICNTVKRAQEIAAALEKTNDRIVLLHSRMTTEHRRRSAELLESLLGPNGNRKTITVVGTQAIEASLDIDLDILRTELCPAPSLVQRAGRVWRRNDPYRSSRITADHKPISVVFIAEAKDWQVLPYLRAETSRTQRWLEKHNQMFLPQMAQEFIDAATVDLDTATSEMDLDALALMGIHLMKADGAKARIQDVLNSDSKVSDFALLTSKNEIDEAQTRLIEEGTHLRIILGDENESIPGGWKHGLSSLLKLKASDRESLRTALLASIPLLVSEKQKQLLYQHNLVPLSSSKTVLAGFYFLPKAQNFYSKNLGFIWPEEKD

SEQ ID NO: 92 - protein, 1084 aa, Corynebacterium diphtheriae
  CRISPR-associated endonuclease
  ref <308>: DATABASE ACCESSION NUMBER: YP_005124303, NCBI Gene Database
  ref <309>: DATABASE ENTRY DATE: 2013-06-11
MKYHVGIDVGTFSVGLAAIEVDDAGMPIKTLSLVSHIHDSGLDPDKIKSAVTRLASSGIARRTRRLYRRKRRRLQQLDKFIQRQGWPVIELEDYSDPLYPWKVRAELAASYIADEKERGEKLSVALRHIARHRGWRNPYAKVSSLYLPDEPSDAFKAIREEIKRASGQPVPETATVGQMVTLCELGTLKLRGEGGVLSARLQQSDHAREIQEICRMQEIGQELYRKIIDVVFAAESPKGSASSRVGKDPLQPGKNRALKASDAFQRYRIAALIGNLRVRVDGEKRILSVEEKNLVFDHLVNLAPKKEPEWVTIAEILGIDRGQLIGTATMTDDGERAGARPPTHDTNRSIVNSRIAPLVDWWKTASALEQHAMVKALSNAEVDDFDSPEGAKVQAFFADLDDDVHAKLDSLHLPVGRAAYSEDTLVRLTRRMLADGVDLYTARLQEFGIEPSWTPPAPRIGEPVGNPAVDRVLKTVSRWLKSATKTWGAPERVIIEHVREGFVTEKRAREMDGDMRRRAARNAKLFQEMQEKLNVQGKPSRADLWRYQSVQRQNCQCAYCGSPITFSNSEMDHIVPRAGQGSTNTRENLVAVCHRCNQSKGNTPFAIWAKNTSIEGVSVKEAVERTRHWVTDTGMRSTDFKKFTKAVVERFQRATMDEEIDARSMESVAWMANELRSRVAQHFASHGTTVRVYRGSLTAEARRASGISGKLEFLDGVGKSRLDRRHHAIDAAVIAFTSDYVAETLAVRSNLKQSQAHRQEAPQWREFTGKDAEHRAAWRVWCQKMEKLSALLTEDLRDDRVVVMSNVRLRLGNGSAHEETIGKLSKVKLGSQLSVSDIDKASSEALWCALTREPDFDPKDGLPANPERHIRVNGTHVYAGDNIGLFPVSAGSIALRGGYAELGSSFHHARVYKITSGKKPAFAMLRVYTIDLLPYRNQDLFSVELKPQTMSMRQAEKKLRDALATGNAEYLGWLVVDDELVVDTSKIATDQVKAVEAELGTIRRWRVDGFFGDTRLRLRPLQMSKEGIKKESAPELSKIIDRPGWLPAVNKLFSEGNVTVVRRDSLGRVRLESTAHLPVTWKVQ

SEQ ID NO: 93 - protein, 1384 aa, Coriobacterium glomerans
  CRISPR-associated endonuclease
  ref <308>: DATABASE ACCESSION NUMBER: YP_004373648, NCBI Gene Database
  ref <309>: DATABASE ENTRY DATE: 2013-07-06
MKLRGIEDDYSIGLDMGTSSVGWAVTDERGTLAHFKRKPTWGSRLFREAQTAAVARMPRGQRRRYVRRRWRLDLLQKLFEQQMEQADPDFFIRLRQSRLLRDDRAEEHADYRWPLFNDCKFTERDYYQRFPTIYHVRSWLMETDEQADIRLIYLALHNIVKHRGNFLREGQSLSAKSARPDEALNHLRETLRVWSSERGFECSIADNGSILAMLTHPDLSPSDRRKKIAPLFDVKSDDAAADKKLGIALAGAVIGLKTEFKNIFGDFPCEDSSIYLSNDEAVDAVRSACPDDCAELFDRLCEVYSAYVLQGLLSYAPGQTISANMVEKYRRYGEDLALLKKLVKIYAPDQYRMFFSGATYPGTGIYDAAQARGYTKYNLGPKKSEYKPSESMQYDDFRKAVEKLFAKTDARADERYRMMMDRFDKQQFLRRLKTSDNGSIYHQLHLEELKAIVENQGRFYPFLKRDADKLVSLVSFRIPYYVGPLSTRNARTDQHGENRFAWSERKPGMQDEPIFPWNWESIIDRSKSAEKFILRMTGMCTYLQQEPVLPKSSLLYEEFCVLNELNGAHWSIDGDDEHRFDAADREGIIEELFRRKRTVSYGDVAGWMERERNQIGAHVCGGQGEKGFESKLGSYIFFCKDVFKVERLEQSDYPMIERIILWNTLFEDRKILSQRLKEEYGSRLSAEQIKTICKKRFTGWGRLSEKFLTGITVQVDEDSVSIMDVLREGCPVSGKRGRAMVMMEILRDEELGFQKKVDDFNRAFFAENAQALGVNELPGSPAVRRSLNQSIRIVDEIASIAGKAPANIFIEVTRDEDPKKKGRRTKRRYNDLKDALEAFKKEDPELWRELCETAPNDMDERLSLYFMQRGKCLYSGRAIDIHQLSNAGIYEVDHIIPRTYVKDDSLENKALVYREENQRKTDMLLIDPEIRRRMSGYWRMLHEAKLIGDKKFRNLLRSRIDDKALKGFIARQLVETGQMVKLVRSLLEARYPETNIISVKASISHDLRTAAELVKCREANDFHHAHDAFLACRVGLFIQKRHPCVYENPIGLSQVVRNYVRQQADIFKRCRTIPGSSGFIVNSFMTSGFDKETGEIFKDDWDAEAEVEGIRRSLNFRQCFISRMPFEDHGVFWDATIYSPRAKKTAALPLKQGLNPSRYGSFSREQFAYFFIYKARNPRKEQTLFEFAQVPVRLSAQIRQDENALERYARELAKDQGLEFIRIERSKILKNQLIEIDGDRLCITGKEEVRNACELAFAQDEMRVIRMLVSEKPVSRECVISLFNRILLHGDQASRRLSKQLKLALLSEAFSEASDNVQRNVVLGLIAIFNGSTNMVNLSDIGGSKFAGNVRIKYKKELASPKVNVHLIDQSVTGMFERRTKIGL

SEQ ID NO: 94 - protein, 1458 aa, Fluviicola taffensis
  CRISPR-associated endonuclease
  ref <308>: DATABASE ACCESSION NUMBER: YP_004345959, NCBI Gene Database
  ref <309>: DATABASE ENTRY DATE: 2013-07-06
MTKTILGLDLGTNSIGWALINQDFDNKKGEILGMGSRIIPMTQDIKDEFGKGNSISQTAERTRLRGVRRLIHRTLLRRERLHRVLNIIGFLPEHYANQIDFEKRFGKFKPESEPKISFDGNDVFLFEKSYQEMLVDFKIHQPQLVSNGKKIPHDWTIYYLRKKALSKKIEKEELAWILLNFNQKRGYYQLRGEEEEETPNKLVEFHSLKIVEVNADEPQKGKPEIWYSLVLENGWVYRRASKTPLFDWKDKIREFIVTTEINNDGTVKTDKEGTEKRSFRAPKPEDWTLQKKKTEFELSKSGNEVGAFIYESILQKPNQKIRGKLISTIERKFYKEELKTILKTQLFFHKELKDEKLYNACIEELYKNNEAHRSLLSNKGFEHLFINDILFYQRPLRSKKSQISNCPLEKRTYKKEGIEITEGIKVISKSNPIYQEFRLWQWISNLSLYCIEPTETNVTSTFLNSIEDYENLFEFLNNRKEIEQKHLLKYLLENQGFKGKLLTNELEKFRWNFVADKKYPCNETGSLLHTRLSKVKNISPDFLTKEIEHQLWHIIYSVTDKIEYEQALKTFARKNNLDVDSFFEHFKKIPPFESTYGAYSEKAIKKLLPLIRLGKYWNWEAIDSISKDRISKILSGEYDENIKNRVREKAVHLTSENNFQGLQEWLAKYIVYDRHSEGNDLGKWTSVSDLETYLKEFKQHSLRNPIVEQVITETLRVVKDIWIKHGKGTENFFDEIHVELGREMKNNSEDRKRLTNTITENENTNLRIKALLMEMMNDNDVENVRPYSPSQQEILKIYEDGALNSNIELDDEIVKISKKAEPTKSELQRYKLWLEQKYRSPYTGQVIPLNKLFTSEYEIEHVVPQSRFFDDSFSNKVICESAVNKRKDNQLGLQFIKNHSGEKVELGFGKVVQVFTEEQYLDFVKEHYSKNRSKHNKLLLEEIPEKMIERQLNDTRYISKFVSSILSNIVRSEKDDDGLNSKNILPGNGKITTELKRDWGLNDVWNDLILPRFERMNTITNSDLFTTYNDKYQKHLPTVPFEYSKGFQKKRIDHRHHAMDALVIACATRDHLNLMNNQSAKSELKRYDLQNKLRKKEPYFNQKENKQKEAFKDFIKPWGTFTEDSKNALEKIIISFKQNLRVINKATNSYESYKDEDGNLRIGKDGKPEKGLIKQKGLNWAIRKPLHKDTVSGQINLSRIKLPNGKILTATRKNLDTSFDLKTIENSITDTGIQKILKNYLLSKESPELAFSPEGLEEMNNEIEKYNNGKFHHPINKARIYELGSKFNVGQTGNRRDKFVEAAKGTNLFFAIYQDENKNRSYETIPLNEVIEHQKWRASLPKEEQEKIPLVPVNKLKGTFIFSLSPNDLVYVPSNDELERSASIDFSKLKKEQINRLYKMVSSSGSQCFFVKSEVATSVVNKMEYSSLNKMEKSIDNLMVKEICIKLKIDRLGNISKA

SEQ ID NO: 95 - protein, 1045 aa, Acidovorax avenae
  CRISPR-associated endonuclease
  ref <308>: DATABASE ACCESSION NUMBER: YP_004232757, NCBI Gene Database
  ref <309>: DATABASE ENTRY DATE: 2013-07-06
MQKEKPLAYRLALDLGSTSLGWAVLRLSAPGEPSAVIRAGSRIFSDGRNPKDGSSLAVTRRAARAMRRRRDRLLKRKARMLAALERHGFFPQDEAARKALEKLNPYGLRARGLESALKPEEFGRALFHLNQRRGFQSNRKTDRKDSDSGALKQAIGTLRAQMHESGCRTVGEWFWKVRMERKPEGVKGQGVRARYRETPFTTDEGKKRIDKRYDLYVDRAMVAQEFDALWAAQATFAPALFNEAARAELRDILLHQRKLRPVQPGRCTLVPEEPRALLALPSTQRFRIYQEVNHLRVLHDELREEALTLAQRDQIVALLERQAKVTFTAMRKALGFSALFNLEDAKRDGLKGNATTAALGKKDLFGPLWAGFDTALQDEIVTQLMTEESEPRLIAWLQEHTGVDEARAQAIANAGLPEGYGSLGRTALARIVPELQRDVITYDKAVQAAGFAHHSDLGFSFEHDADEVERIGERTIASTGEIKPVFAFKQLPYYGRALQRHVAFAKENPRNDEERYGKIANPTVHIGLNQVRVVVNALMCRYGRPTEVVIELARDLKQSREQKLEAQQRQADNQKRNARIRRSIAEVLGISEERVRTLDIQKWILWEELSHDAADRRCPYSGVQISASMLLGERVEIEHILPFSMTLDDSLNNRTVALREANRIKRNRTPWDARTDFEAHGWSYDGILQRAERMPQRKRHRFAPDGYERWLGEDKDFLARALNDTRYLSRVAAEYLRLVCPGSATRVIPGQMTALLRGKFGLNDVLGLDGEKNRNDHRHHAVDACVIGVTDQRMMQRFAQANAQAREDGLTRLVEDMPLPWPTYRAHVERAVRHIWVSHKPDHGFEGAMMEETSYGILRDGTIKQRRKADGSAGREISRLIRITEPSQPQRHGVDAEGRPLPYKGYVGGSNYCLEITVNDKGKWEGQVISTFDAYRIVREGGLRQLRHSTQGQNGQALAMRLVIGDSVRLEVDEQERVMRIVKINGNNGQVFMAPVHEANVDARNSDKNEAFAYTSKIAGSFQKTKARQVTISPIGELRDPGFKG

SEQ ID NO: 96 - protein, 1044 aa, Nitrosomonas sp.
  CRISPR-associated endonuclease
  ref <308>: DATABASE ACCESSION NUMBER: YP_004295898, NCBI Gene Database
  ref <309>: DATABASE ENTRY DATE: 2013-07-06
MLHKMRYRLALDLGSTSLGWAMVRLNANQQPCAVIKAGVRIFSNGRNPKDGSSLAVTRREARSMRRRRDRLLKRKARMMRTLIEYGFFPANETQRKALENLNPYALRAKGLDEALTPSEFARALFHINQRRGFKSNRKTDKKDSDSGALKTAIKQLHSVLDPQGNDGKPRTVGELLYKRFTDLSKLPKDRTVRARYRQDKIVKDDGKTKIDKYYDLYIDRAMIEQEFDALWKKQSELNPILFTENARADLKDVLLYQRSLKPVKPGRCTFMSEEERAPLALPSTQRFRMYQEVNNLRILREGLKEESLTLQQRDDLINALEKNNRRTFTQIKKLLGVGGSVQFNFEDPKREELKGNTTSAILGKSEHFGEAWFAFNEAKQDAIVLQLIKEENEAKLVRWLQDETGIDEKRAEVIANAGLPEGYGSLCIEALARILPELRRDVVTYDKAVQAAGFEHHSKLNRNEEIPDITFKIESIDRNSGEIKQFHLHKELPYYGEYLQRHVGFGSGKPEDSIEKRYGKIANPTVHIGLNQVRVVVNALIKRYGHPSEIIVEVARDLKQSKDRRDEENKRQAENQKRNERLRKDIADILGISEERVRRDDIEKMILWEELSFDPADRRCPYSGVQVSTVMLLSDEVEVEHILPFSQTLDDSLNNKTVALRQANRIKGNRTPWEAFGTSNISGFDYSGILTRAELMPKAKRYRFAEDGYQRWLKDDAGFLARALNDTRHLSKIAREYMSLICPNTRVIPGQMTAMLRRNFGLNDVLGLNGEKNRNDHRHHAVDACVIAVTDQGLLQRFAAASASARERQLNRLVENMPLPWESYREHVRRAIDGIWVSHRPDHSHEGAMHNDTAYGLRGNGRVSFHKMVEGKREYIEDNLKVIEITDTKAIDRHGLLPTGKPRPYKGYKGDSNYCIEIVRNEKGRWEGEIISTFDAYQLVRKYGIVQLRYPVLSVSGKPLVMRLIRNDFVRLEHEGITRTLRVCKMREDGQVALADVTEANVDARTRTKEICYVFKTGGSLQKAKARRITISPIGELRDPGFKE

SEQ ID NO: 97 - protein, 1179 aa, Sphaerochaeta globosa
  CRISPR-associated endonuclease
  ref <308>: DATABASE ACCESSION NUMBER: YP_004248194, NCBI Gene Database
  ref <309>: DATABASE ENTRY DATE: 2013-07-06
MSKKVSRRYEEQAQEICQRLGSRPYSIGLDLGVGSIGVAVAAYDPIKKQPSDLVFVSSRIFIPSTGAAERRQKRGQRNSLRHRANRLKFLWKLLAERNLMLSYSEQDVPDPARLRFEDAVVRANPYELRLKGLNEQLTLSELGYALYHIANHRGSSSVRTFLDEEKSSDDKKLEEQQAMTEQLAKEKGISTFIEVLTAFNTNGLIGYRNSESVKSKGVPVPTRDIISNEIDVLLQTQKQFYQEILSDEYCDRIVSAILFENEKIVPEAGCCPYFPDEKKLPRCHFLNEERRLWEAINNARIKMPMQEGAAKRYQSASFSDEQRHILFHIARSGTDITPKLVQKEFPALKTSIIVLQGKEKAIQKIAGFRFRRLEEKSFWKRLSEEQKDDFFSAWTNTPDDKRLSKYLMKHLLLTENEVVDALKTVSLIGDYGPIGKTATQLLMKHLEDGLTYTEALERGMETGEFQELSVWEQQSLLPYYGQILTGSTQALMGKYWHSAFKEKRDSEGFFKPNTNSDEEKYGRIANPVVHQTLNELRKLMNELITILGAKPQEITVELARELKVGAEKREDIIKQQTKQEKEAVLAYSKYCEPNNLDKRYIERFRLLEDQAFVCPYCLEHISVADIAAGRADVDHIFPRDDTADNSYGNKVVAHRQCNDIKGKRTPYAAFSNTSAWGPIMHYLDETPGMWRKRRKFETNEEEYAKYLQSKGFVSRFESDNSYIAKAAKEYLRCLFNPNNVTAVGSLKGMETSILRKAWNLQGIDDLLGSRHWSKDADTSPTMRKNRDDNRHHGLDAIVALYCSRSLVQMINTMSEQGKRAVEIEAMIPIPGYASEPNLSFEAQRELFRKKILEFMDLHAFVSMKTDNDANGALLKDTVYSILGADTQGEDLVFVVKKKIKDIGVKIGDYEEVASAIRGRITDKQPKWYPMEMKDKIEQLQSKNEAALQKYKESLVQAAAVLEESNRKLIESGKKPIQLSEKTISKKALELVGGYYYLISNNKRTKTFVVKEPSNEVKGFAFDTGSNLCLDFYHDAQGKLCGEIIRKIQAMNPSYKPAYMKQGYSLYVRLYQGDVCELRASDLTEAESNLAKTTHVRLPNAKPGRTFVIIITFTEMGSGYQIYFSNLAKSKKGQDTSFTLTTIKNYDVRKVQLSSAGLVRYVSPLLVDKIEKDEVALCGE

SEQ ID NO: 98 - protein, 315 aa, Thauera sp.
  CRISPR-associated endonuclease
  ref <308>: DATABASE ACCESSION NUMBER: YP_002364238, NCBI Gene Database
  ref <309>: DATABASE ENTRY DATE: 2013-06-07
MARSTYKRTEEEKRNLKVDLSRIPEWESEIESIRSRFRRFSLPKISSAASLVHEMRKKLYIGRHSDRERDAEALENWKRSLSIDSLIRMSDDYSAPTFLRSGVEENIIDKIRSTLEQTERQLAEYRTRGVTDSFWVSVFTSKVDSDTVKRFEQQKTDYLALSREIPRVAEAIRLLDEVRSESREFANRVSKIKERLWLAEEKMDAIERFEAKHGRVFGKASAVDNKTRERASSLKRLVKKTKDCPYCGSELGVDPHLDHIYPVSKGGLSVIENLVWCCSACNTVKSDKGLMQFLKERGFSIDRTLSRLHALGKHV

SEQ ID NO: 99 - protein, 1003 aa, Gluconacetobacter diazotrophicus
  CRISPR-associated endonuclease
  ref <308>: DATABASE ACCESSION NUMBER: YP_002274753, NCBI Gene Database
  ref <309>: DATABASE ENTRY DATE: 2013-06-10
MIDESLTFGIDLGIGSCGWAVLRRPSAFGRKGVIEGMGSWCFDVPETSKERTPTNQIRRSNRLLRRVIRRRRNRMAAIRRLLHAAGLLPSTDSDALKRPGHDPWELRARGLDKPLKPVEFAVVLGHIAKRRGFKSAAKRKATNISSDDKKMLTALEATRERLGRYRTVGEMFARDPDFASRRRNREGKYDRTTARDDLEHEVHALFAAQRRLGQGFASPELEEAFTASAFHQRPMQDSERLVGFCPFERTEKRAAKLTPSFERFRLLARLLNLRITTPDGERPLTVDEIALVTRDLGKTAKLSIKRVRTLIGLEDNQRFTTIRPEDEDRDIVARTGGAMTGTATLRKALGEALWTDMQERPEQLDAIVQVLSFFEANETITEKLREIGLTLAVLDVLLTALDAGVFAKFKGAAHISTKAARNLLPHLEQGRRYDEACTMAGYDHAASRLSHHGQIVAKTQFNALVTEIGESIANPIARKALIEGLKQIWAMRNHWGLPGSIHVELARDVGNSIEKRREIEKHIEKNTALRARERREVHDLLDLEDVNGDTLLRYRLWKEQGGKCLYTGKAIHIRQIAATDNSVQVDHILPWSRFGDDSFNNKTLCLASANQQKKRSTPYEWLSGQTGDAWNAFVQRIETNKELRGFKKRNYLLKNAKEAEEKFRSRNLNDTRYAARLFAEAVKLLYAFGERQEKGGNRRVFTRPGALTAALRQAWGVESLKKQDGKRINDDRHHALDALTVAAVDEAEIQRLTKSFHEWEQQGLGRPLRRVEPPWESFRADVEATYPEVFVARPERRRARGEGHAATIRQVKERECTPIVFERKAVSSLKEADLERIKDGERNEAIVEAIRSWIATGRPADAPPRSPRGDIITKIRLATTIKAAVPVRGGTAGRGEMVRADVFSKPNRRGKDEWYLVPVYPHQIMNRKAWPKPPMRSIVANKDEDEWTEVGPEHQFRFSLYPRSNIEIIRPSGEVIEGYFVGLHRNTGALIPTPVGPDSYVIA

SEQ ID NO: 100 - protein, 984 aa, Campylobacter jejuni
  CRISPR-associated endonuclease
  ref <308>: DATABASE ACCESSION NUMBER: YP_001398821, NCBI Gene Database
  ref <309>: DATABASE ENTRY DATE: 2013-06-10
MAKILAFDIGISSIGWAFSENDELKDCGVRIFTKAENPKTGESLALPRRIARSARKRLARRKARLNHLKHLIANEFKLNYEDYQSFDEILAKAYKGSLISPYELRFRALNELLSKQDFARVILHIAKRRGYDDIKNNGDEEKGKILKAIKQNEEKLANYQSVGEYLYKEYFQKFKENSKEFINVRNKKESYERCIAQSFLKDELKLIFKKQREFGFSFSKKFEEEVLSVAFYKRALKDFSHLVGNCSFFTDEKRAPKNSPLAFMFVALTRIINLLNNLKNTLYTKDDLNALLNEVLKNGTLTYKQTKKLLGLSDDYEFKGEKGNYFIEFKKYKEFIKALGEHSLSQDDLNEIAKDITLIKDEIKLKKALAKYDLNENQIDNLSKLEFKDHLNISFKALKLITPLMLEGKKYDEACNELTLKVAINEDKKDFLPAFNETYYKDEVTNPVVLRAIKEYRKVLNALLKKYGKVHKINIELAREVGKNHSQRAKIEKEQNENYKAKKDAELECEKLGLKINSKNILKLRLFKEQKEFCVYSGEKIKLSDLQDEKMLEIDHIYPYSRSFDDSYMNKVLVFTKQNQEKLNQTPFEAFGNDSAKWQKIEVLAKNLPTKKQKRILDKNYKDKEQKDFKDRNLNDTRYIARLVLNYTKDYLDFLPLSDDENTKLNDTQKGSKVHVEAKSGMLTSALRHTWGFSTKDRNNHLHHAIDAVIIAYANNSIVKAFSDFKKEQESNTAELYAKKISELDYKNKRKFFEPFSGFRQKVLDKIDEIFVSKPERKKPSGALHEETFRKEEEFYQSYGGKEGVLKALELGKIRKVNGKIVKNGDMFRVDIFKHKKTNKFYAVPIYTMDFALKVLPNKAVARSKKGEIKDWILMDENYEFCFSLYKDSLILIQTKDMQEPEFVYYNAFTSSTVSLIVSKHDNKFETLSKNQKILFKNANEKEVIAKSIGIQNLKVFEKYIVSALGEVTKAEFRQREEFKNELR

SEQ ID NO: 101 - protein, 1062 aa, Actinobacillus succinogenes
  CRISPR-associated endonuclease
  ref <308>: DATABASE ACCESSION NUMBER: YP_001343689, NCBI Gene Database
  ref <309>: DATABASE ENTRY DATE: 2013-06-10
MNLNYILGLDLGIASVGWAVVEIDEQENPQRLIDVGVRTFDRAEVLKTGESLALARRLARSSRRLVKRRAERIKKAKRLLKAENLLLSADEILPNEAWQLRVKGLDQKLERQEWAAVLLHLLKHRGYLSQRKNESKSENKELGALLSGVAINHQILQSAEYRTPAEIAVNKFQAEEGHIRNQRGAYTHTFSRLDLLAEMELLFQRQATLGNPHTSTKLLENLTALLMWQKPALAGEAILKMLGKCTFEPTEYKAAKNSYSAERFVWLTKLNNLRILEQGAERALTDNERFALLDQPYEKAKLTYAQVRTLLGLSDEAIFKGLRYQGEDKKAVETKTTLMEVKAYHQIRKALEGLDLKAEWNELKNNPALLDEIGTAFSLYKTDDDIHRYLDGKLSESVLNALLENLNFDKFIQLSLKALQQILPLMLQGQRYDEAVSAIYGDHYGKKSDEIDRLLPNIPTDEIRNPVVLRTLTQARKVINAVVRLYGSPARIHIETGREVGKSYQDRKKLEKQQEENRKQRENAVKKFKEYFPNFVGEPKGKDILKMRLYELQQAKCLYSGKSLELYRLLEKGYVEVDHALPFSRTWDDSFNNKVLVLANENQNKGNATPYEWLDGKNNSEGWQHFVARVQTSGFSYAKKQRVLIQELDEKSFIERNLNDTRYVARFLCNHIADNMLLTGKGKRKVFASNGQITALLRGCWGLQKVRENNDRHHALDAVVVACSTKSMQDKITKFVKYKEGRLFKDKKDGVYKGERINRETGEIISLHFPTPWKFFKENVEIRIFSENPKLELENRLPDYPQYNHEFVQPLFVSRMPTRKMTGQGHMETVKSAKRLDKGLSVLKVPLTQLKLSDLERMVNREREMALYEALKECLEQFGNDPAKAFAEPFYKKGGALVKAVRVEQTQKSGVLVRNGNGVADNATGSIVRVDVFTKGGKYFLVPIYTWQVAKGILPNKAVIQGKDESEWEEMDENAVFQFSMHKNDLIKVKTKKGEIFGYFNGLDRATGSIEIEEHDLEKSKGKNGSHRGLGVKTAFFLEKYQVDELGKNIRPCRPTKRQHVR

SEQ ID NO: 102 - protein, 1068 aa, Verminephrobacter eiseniae
  CRISPR-associated endonuclease
  ref <308>: DATABASE ACCESSION NUMBER: YP_996018, NCBI Gene Database
  ref <309>: DATABASE ENTRY DATE: 2013-06-10
MNKAVAYRLALDLGSTSLGWAIFRLNEAREPTAIIRAGVRIFSDGRNANSEPLAVHRRVARAMRRRRDRLLKRKKRMHDQLVQHGFFPAEVAERKELERLNPYQLRAKGLHEALTPGEFARALFHINQRRGFKSNRKTDRKDNDSGALKQAISELRKRIQDSDCATAGEWFWKERMQQKPEGVRGQWVRARYRKTPSTTDEGKKRIGYDLYVDRAMVEQEFDALWAAQAALQPGLFTEAARAELKDTLLYQRDLRPVKPGRCTLLPAEERAPLALPSTQRFRILQEVNNLRLLDEALREVPLNLAQRDAVVSALEGKKELSFAAIRKLLTLSGKFNLEDEKRAELKGNATSVILARKDLFGDAWAGFDAAVQDEIVWRLVSQESEGALIAWLQQHTGVDGVCAEAIVNTRLPDGYGRLSRKALERIVPALQREVCTYDKAVQAAGFAHHSDLGFDFDYAEDEVQQVGEHTIASTGEVQAQYAFKQLPYYGKALQRHVAFGSGDAKDHEEKCYGKIANPTVHIGLNQVRTVVNALIRRYGHPTEVVVELARDLKQSREQKQQTQREQADNQKRNEDIRKRIAPILETSPERVRDRDIKKWILWEELNKKDIADRHCPYSGERISATMLLSEAVEIEHILPFSRTLDDSLNNRTVAMRRANRIKGDRTPWEARADFEAQGWRYEAILQRAEGMPPRKRYRFAEDGYQRWLGKDRNFLARALNDTSYLSRLAANYLRLVCPQGVRVIPGQMTDKLRGKFGLNSVLGLDGKKNRNDHRHHAVDACVIGVTDQGLMQRFANASKQARENGLTRLVQDMLLPWWPSYYDHVERAVRHIRVSHRPDHGFEGAMMKGTAHGIREDGIREDGRIKQRPKAKGSADHKTITLIPIDEPRQLARHGVDAEGKPLPYKGYASGSNYCIEITKNGKGKWEGQVISTFDAYRIKAAADAAARAGQVISTVEADSIVRKSGWERLRGAQSQNGQPLVMRLVIGDSVRMEVDGRDEVMRVVKMSGKEMVFAPVREANVDKRNNMPDEQDPFTYTYKRADQLRKAKARQVTISPIGELRDPGFKG

SEQ ID NO: 103 - protein, 1368 aa, Streptococcus pyogenes
  CRISPR-associated endonuclease
  ref <308>: DATABASE ACCESSION NUMBER: YP_598495, NCBI Gene Database
  ref <309>: DATABASE ENTRY DATE: 2013-09-06
MDKKYSIGLDIGTNSVGWAVITDDYKVPSKKFKVLGNTDRHSIKKNLIGALLFDSGETAEATRLKRTARRRYTRRKNRICYLQEIFSNEMAKVDDSFFHRLEESFLVEEDKKHERHPIFGNIVDEVAYHEKYPTIYHLRKKLVDSTDKADLRLIYLALAHMIKFRGHFLIEGDLNPDNSDVDKLFIQLVQTYNQLFEENPINASGVDAKAILSARLSKSRRLENLIAQLPGEKKNGLFGNLIALSLGLTPNFKSNFDLAEDAKLQLSKDTYDDDLDNLLAQIGDQYADLFLAAKNLSDAILLSDILRLNSEITKAPLSASMIKRYDEHHQDLTLLKALVRQQLPEKYKEIFFDQSKNGYAGYIDGGASQEEFYKFIKPILEKMDGTEELLAKLNREDLLRKQRTFDNGSIPHQIHLGELHAILRRQEDFYPFLKDNREKIEKILTFRIPYYVGPLARGNSRFAWMTRKSEETITPWNFEEVVDKGASAQSFIERMTNFDKNLPNEKVLPKHSLLYEYFTVYNELTKVKYVTEGMRKPAFLSGEQKKAIVDLLFKTNRKVTVKQLKEDYFKKIECFDSVEISGVEDRFNASLGTYHDLLKIIKDKDFLDNEENEDILEDIVLTLTLFEDREMIEERLKTYAHLFDDKVMKQLKRRRYTGWGRLSRKLINGIRDKQSGKTILDFLKSDGFANRNFMQLIHDDSLTFKEDIQKAQVSGQGDSLHEHIANLAGSPAIKKGILQTVKVVDELVKVMGRHKPENIVIEMARENQTTQKGQKNSRERMKRIEEGIKELGSQILKEHPVENTQLQNEKLYLYYLQNGRDMYVDQELDINRLSDYDVDHIVPQSFIKDDSIDNKVLTRSDKNRGKSDNVPSEEVVKKMKNYWRQLLNAKLITQRKFDNLTKAERGGLSELDKAGFIKRQLVETRQITKHVAQILDSRMNTKYDENDKLIREVKVITLKSKLVSDFRKDFQFYKVREINNYHHAHDAYLNAVVGTALIKKYPKLESEFVYGDYKVYDVRKMIAKSEQEIGKATAKYFFYSNIMNFFKTEITLANGEIRKRPLIETNGETGEIVWDKGRDFATVRKVLSMPQVNIVKKTEVQTGGFSKESILPKRNSDKLIARKKDWDPKKYGGFDSPTVAYSVLVVAKVEKGKSKKLKSVKELLGLTIMERSSFEKNPIDFLEAKGYKEVKKDLIIKLPKYSLFELENGRKRMLASAGELQKGNELALPSKYVNFLYLASHYEKLKGSPEDNEQKQLFVEQHKHYLDEIIEQISEFSKRVILADANLDKVLSAYNKHRDKPIREQAENIIHLFTLTNLGAPAAFKYFDTTIDRKRYTSTKEVLDATLIHQSITGLYETRIDLSQLGGD

SEQ ID NO: 104 - protein, 1377 aa, Streptococcus agalactiae
  CRISPR-associated endonuclease
  ref <308>: DATABASE ACCESSION NUMBER: NP_735360, NCBI Gene Database
  ref <309>: DATABASE ENTRY DATE: 2013-06-27
MNKPYSIGLDIGTNSVGWSIITDDYKVPAKKMRVLGNTDKEYIKKNLIGALLFDGGNTAADRRLKRTARRRYTRRRNRILYLQEIFAEEMSKVDDSFFHRLEDSFLVEEDKRGSKYPIFATMQEEKYYHEKFPTIYHLRKELADKKEKADLRLVYLALAHIIKFRGHFLIEDDRFDVRNTDIQKQYQAFLEIFDTTFENNHLLSQNVDVEAILTDKISKSAKKDRILAQYPNQKSTGIFAEFLKLIVGNQADFKKHFNLEDKTPLQFAKDSYDEDLENLLGQIGDEFADLFSVAKKLYDSVLLSGILTVTDLSTKAPLSASMIQRYDEHHEDLKHLKQFVKASLPENYREVFADSSKDGYAGYIEGKTNQEAFYKYLLKLLTKQEGSEYFLEKIKNEDFLRKQRTFDNGSIPHQVHLTELRAIIRRQSEYYPFLKENQDRIEKILTFRIPYYVGPLAREKSDFAWMTRKTDDSIRPWNFEDLVDKEKSAEAFIHRMTNNDLYLPEEKVLPKHSLIYEKFTVYNELTKVRFLAEGFKDFQFLNRKQKETIFNSLFKEKRKVTEKDIISFLNKVDGYEGIAIKGIEKQFNASLSTYHDLKKILGKDFLDNTDNELILEDIVQTLTLFEDREMIKKCLDIYKDFFTESQLKKLYRRHYTGWGRLSAKLINGIRNKENQKTILDYLIDDGSANRNFMQLINDDDLSFKPIIDKARTGSHSDNLKEVVGELAGSPAIKKGILQSLKIVDELVKVMGYEPEQIVVEMARENQTTAKGLSRSRQRLTTLRESLANLKSNILEEKKPKYVKDQVENHHLSDDRLFLYYLQNGRDMYTKKALDIDNLSQYDIDHIIPQAFIKDDSIDNRVLVSSAKNRGKSDDVPSIEIVKARKMFWKNLLDAKLMSQRKYDNLTKAERGGLTSDDKARFIQRQLVETRQITKHVARILDERFNNEVDNGKKICKVKIVTLKSNLVSNFRKEFGFYKIREVNDYHHAHDAYLNAVVAKAILTKYPQLEPEFVYGMYRQKKLSKIVHEDKEEKYSEATRKMFFYSNLMNMFKRVVRLADGSIVVRPVIETGRYMRKTAWDKKKHFATVRKVLSYPQNNIVKKTEIQTGGFSKESILAHGNSDKLIPRKTKDIYLDPKKYGGFDSPIVAYSVLVVADIKKGKAQKLKTVTELLGITIMERSRFEKNPSAFLESKGYLNIRDDKLMILPKYSLFELENGRRRLLASAGELQKGNELALPTQFMKFLYLASRYNESKGKPEEIEKKQEFVNQHVSYFDDILQLINDFSKRVILADANLEKINKLYQDNKENIPVDELANNIINLFTFTSLGAPAAFKFFDKIVDRKRYTSTKEVLNSTLIHQSITGLYETRIDLGKLGED

SEQ ID NO: 105 - protein, 1082 aa, Neisseria meningitidis
  CRISPR-associated endonuclease
  ref <308>: DATABASE ACCESSION NUMBER: YP_002342100, NCBI Gene Database
  ref <309>: DATABASE ENTRY DATE: 2013-06-10
MAAFKPNPINYILGLDIGIASVGWAMVEIDEDENPICLIDLGVRVFERAEVPKTGDSLAMARRLARSVRRLTRRRAHRLLRARRLLKREGVLQAADFDENGLIKSLPNTPWQLRAAALDRKLTPLEWSAVLLHLIKHRGYLSQRKNEGETADKELGALLKGVADNAHALQTGDFRTPAELALNKFEKESGHIRNQRGDYSHTFSRKDLQAELILLFEKQKEFGNPHVSGGLKEGIETLLMTQRPALSGDAVQKMLGHCTFEPAEPKAAKNTYTAERFIWLTKLNNLRILEQGSERPLTDTERATLMDEPYRKSKLTYAQARKLLGLEDTAFFKGLRYGKDNAEASTLMEMKAYHAISRALEKEGLKDKKSPLNLSPELQDEIGTAFSLFKTDEDITGRLKDRIQPEILEALLKHISFDKFVQISLKALRRIVPLMEQGKRYDEACAEIYGDHYGKKNTEEKIYLPPIPADEIRNPVVLRALSQARKVINGVVRRYGSPARIHIETAREVGKSFKDRKEIEKRQEENRKDREKAAAKFREYFPNFVGEPKSKDILKLRLYEQQHGKCLYSGKEINLGRLNEKGYVEIDHALPFSRTWDDSFNNKVLVLGSENQNKGNQTPYEYFNGKDNSREWQEFKARVETSRFPRSKKQRILLQKFDEDGFKERNLNDTRYVNRFLCQFVADRMRLTGKGKKRVFASNGQITNLLRGFWGLRKVRAENDRHHALDAVVVACSTVAMQQKITRFVRYKEMNAFDGKTIDKETGEVLHQKTHFPQPWEFFAQEVMIRVFGKPDGKPEFEEADTPEKLRTLLAEKLSSRPEAVHEYVTPLFVSRAPNRKMSGQGHMETVKSAKRLDEGVSVLRVPLTQLKLKDLEKMVNREREPKLYEALKARLEAHKDDPAKAFAEPFYKYDKAGNRTQQVKAVRVEQVQKTGVWVRNHNGIADNATMVRVDVFEKGDKYYLVPIYSWQVAKGILPDRAVVQGKDEEDWQLIDDSFNFKFSLHPNDLVEVITKKARMFGYFASCHRGTGNINIRIHDLDHKIGKNGILEGIGVKTALSFQKYQIDELGKEIRPCRLKKRPPVR

SEQ ID NO: 106 - protein, 1430 aa, Capnocytophaga canimorsus
  CRISPR-associated endonuclease
  ref <308>: DATABASE ACCESSION NUMBER: YP_004740688, NCBI Gene Database
  ref <309>: DATABASE ENTRY DATE: 2013-06-11
MKHILGLDLGTNSIGWAVVKEAQNDNEQSEIVDVGVRVNPLTTDEKTNFEKGKPISTNADRTLKRSARRNLQRYKLRRKELIELLKEHQLISTDTILTENGKGTTFQTLELRAKSAKEKISLEELARVFLTINKKRGYKSSRKAKNEDEGQLIDGMEIAKRLYEENLTTGQLSLQLLKEGKKSLPDYYRSDLQFELDKVWNFQKQFHSHILTDEFYAQLKGKGQRATSALFLAKYQIYTAENKGSREDKKLQAYQWRVDALSKELTREQLAFVITEINNNLNNSSGYLGAISDRSKELYFNNETVGEYLWKQIAANPHTSLKNQVFYRQDYLDEFEQIWKTQSAFYPEILTDELKKELRDVVIFYQRKLKSQKSLVSFCEFENKEIEIKKEDGTSTKKVIGLKVAPKSSPLFQEFKIWQNLNNVLIRKKGSKTKKVDKNQQAVLFEEEKTIFELDLEAKQALFNELNLKGNLKAYYCLEILGYSPKEWEMNYSVLEGNRTNKALYEAYLKITDLEGYDAKNHLKVKLNKDEVELDDLKVPASEIKDMVQAIFKEAGINTDILHFNAELDGKDFENQASYQLWHLLYSYEGDDSKSGNELLYKLLETKFGFKKEYAQILANVSLSDDYGSLSTKAMRKIHPYIKENKFSTACELAGYRHSKHSLTKEENDNRVLKDSLEVLKKNSLRQPVVEKILNQMINLVNALLKKYRTENPNFKFDEIRIELARELKKNAEERANMTVNINKAKTEHEKIIKILKNEFGLPNPTRNDIIRYRLYEELKANGYKDLYTNEYIEKQDLFTKNIDIEHIIPKSRVFDDSFSNKTLSFRKTNLDKGERTAFDYIESKFGADKLEEYVARVEDLYKNNIISKAKYQKLLKKESEIGDGFVERDLRETQYIAKKAKEILLQITPNVLSTSGGITDRLREDWDLINVMKELNLPKYRALGLTQMEDRKYGQQVEVIIDWTKRNDHRHHAMDALTVAFTKHNHIQYLNYLNARKNEKHREHSNIMGIQQLETIKVTDKNGNEKRVFKAPMPNFRQVTKAFLENVLISHKAKNKVVTKNKNKVAGSNKVQEVLTPRGQLHKETVYGKYQYYVQKEEKIGGKFDLETIKKVANPLYQSLLKKRLEENGGDPKKAFTGKNSLAKNPIYLDDAQTEQLPEKVKLVWLENSFSIRKDITPENFKDEKLIDKILDEGVKRILKERLQSFGNDAKKAFSDLDKNPIWLNKEKGIAIKRVAISGVANAEPLHTKKDHLGKEILDKEGKSIPVDFISTGNNHHVAVYRDEKGNLQEKVVSVFEAVVRANQGLPIIDKTYNQHLGWEFLFTMKQNEMFVFSNESTGFNPNDIDLLDPKNKKIISPNLFRVQKFSKLQYGNSFVREFVFRHHLETTVEDRKELQGITYKQMKNSAFFNDIIKVRINHLGGIVSVGEY

SEQ ID NO: 107 - protein, 1372 aa, Legionella pneumophila
  CRISPR-associated endonuclease
  ref <308>: DATABASE ACCESSION NUMBER: YP_122507, NCBI Gene Database
  ref <309>: DATABASE ENTRY DATE: 2013-06-10
MESSQILSPIGIDLGGKFTGVCLSHLEAFAELPNHANTKYSVILIDHNNFQLSQAQRRATRHRVRNKKRNQFVKRVALQLFQHILSRDLNAKEETALCHYLNNRGYTYVDTDLDEYIKDETTINLLKELLPSESEHNFIDWFLQKMQSSEFRKILVSKVEEKKDDKELKNAVKNIKNFITGFEKNSVEGHRHRKVYFENIKSDITKDNQLDSIKKKIPSVCLSNLLGHLSNLQWKNLHRYLAKNPKQFDEQTFGNEFLRMLKNFRHLKGSQESLAVRNLIQQLEQSQDYISILEKTPPEITIPPYEARTNTGMEKDQSLLLNPEKLNNLYPNWRNLIPGIIDAHPFLEKDLEHTKLRDRKRIISPSKQDEKRDSYILQRYLDLNKKIDKFKIKKQLSFLGQGKQLPANLIETQKEMETHFNSSLVSVLIQIASAYNKEREDAAQGIWFDNAFSLCELSNINPPRKQKILPLLVGAILSEDFINNKDKWAKFKIFWNTHKIGRTSLKSKCKEIEEARKNSGNAFKIDYEEALNHPEHSNNKALIKIIQTIPDIIQAIQSHLGHNDSQALIYHNPFSLSQLYTILETKRDGFHKNCVAVTCENYWRSQKTEIDPEISYASRLPADSVRPFDGVLARMMQRLAYEIAMAKWEQIKHIPDNSSLLIPIYLEQNRFEFEESFKKIKGSSSDKTLEQAIEKQNIQWEEKFQRIINASMNICPYKGASIGGQGEIDHIYPRSLSKKHFGVIFNSEVNLIYCSSQGNREKKEEHYLLEHLSPLYLKHQFGTDNVSDIKNFISQNVANIKKYISFHLLTPEQQKAARHALFLDYDDEAFKTITKFLMSQQKARVNGTQKFLGKQIMEFLSTLADSKQLQLEFSIKQITAEEVHDHRELLSKQEPKLVKSRQQSFPSHAIDATLTMSIGLKEFPQFSQELDNSWFINHLMPDEVHLNPVRSKEKYNKPNISSTPLFKDSLYAERFIPVWVKGETFAIGFSEKDLFEIKPSNKEKLFTLLKTYSTKNPGESLQELQAKSKAKWLYFPINKTLALEFLHHYFHKEIVTPDDTTVCHFINSLRYYTKKESITVKILKEPMPVLSVKFESSKKNVLGSFKHTIALPATKDWERLFNHPNFLALKANPAPNPKEFNEFIRKYFLSDNNPNSDIPNNGHNIKPQKHKAVRKVFSLPVIPGNAGTMMRIRRKDNKGQPLYQLQTIDDTPSMGIQINEDRLVKQEVLMDAYKTRNLSTIDGINNSEGQAYATFDNWLTLPVSTFKPEIIKLEMKPHSKTRRYIRITQSLADFIKTIDEALMIKPSDSIDDPLNMPNEIVCKNKLFGNELKPRDGKMKIVSTGKIVTYEFESDSTPQWIQTLYVTQLKKQP

SEQ ID NO: 108 - protein, 346 aa, Clostridium beijerinckii
  CRISPR-associated endonuclease
  ref <308>: DATABASE ACCESSION NUMBER: YP_001309203, NCBI Gene Database
  ref <309>: DATABASE ENTRY DATE: 2013-06-10
MYTIEEILEMKYPYELFTGNKETAKKEHIDLLKIFHPDLHRDSEKYKEVTSKINELYSETVKLLDNGNWIEDGLIKITSSDGEKYSMKYNVEYSFELGSYFIGNRSILYLIDKKHKDFVENALDRIKNLKYENNNMKSEFEKYFPKVLKRFETMDKKIGLLIEKPEDAYSLKDILSYYSSKVPPRHVMWILSSLYNITCFLYYNNLSHNGINIDNYFISPSYHSGFLLGGWWYTVPIDGKMLGIPSEIYSIMSPEMKSSKTGTFLLDLESIRLIGRTLLGDKNGMSFIEDSDIPKPLIDWARGVSVNNPMEEYKLWESVIKQSYGERKFIEMDIDITKLYAGKINK

SEQ ID NO: 109 - protein, 1236 aa, Mycoplasma mobile
  CRISPR-associated endonuclease
  ref <308>: DATABASE ACCESSION NUMBER: YP_015730, NCBI Gene Database
  ref <309>: DATABASE ENTRY DATE: 2013-06-10
MYFYKNKENKLNKKVVLGLDLGIASVGWCLTDISQKEDNKFPIILHGVRLFETVDDSDDKLLNETRRKKRGQRRRNRRLFTRKRDFIKYLIDNNIIELEFDKNPKILVRNFIEKYINPFSKNLELKYKSVTNLPIGFHNLRKAAINEKYKLDKSELIVLLYFYLSLRGAFFDNPEDTKSKEMNKNEIEIFDKNESIKNAEFPIDKIIEFYKISGKIRSTINLKFGHQDYLKEIKQVFEKQNIDFMNYEKFAMEEKSFFSRIRNYSEGPGNEKSFSKYGLYANENGNPELIINEKGQKIYTKIFKTLWESKIGKCSYDKKLYRAPKNSFSAKVFDITNKLTDWKHKNEYISERLKRKILLSRFLNKDSKSAVEKILKEENIKFENLSEIAYNKDDNKINLPIINAYHSLTTIFKKHLINFENYLISNENDLSKLMSFYKQQSEKLFVPNEKGSYEINQNNNVLHIFDAISNILNKFSTIQDRIRILEGYFEFSNLKKDVKSSEIYSEIAKLREFSGTSSLSFGAYYKFIPNLISEGSKNYSTISYEEKALQNQKNNFSHSNLFEKTWVEDLIASPTVKRSLRQTMNLLKEIFKYSEKNNLEIEKIVVEVTRSSNNKHERKKIEGINKYRKEKYEELKKVYDLPNENTTLLKKLWLLRQQQGYDAYSLRKIEANDVINKPWNYDIDHIVPRSISFDDSFSNLVIVNKLDNAKKSNDLSAKQFIEKIYGIEKLKEAKENWGNWYLRNANGKAFNDKGKFIKLYTIDNLDEFDNSDFINRNLSDTSYITNALVNHLTFSNSKYKYSVVSVNGKQTSNLRNQIAFVGIKNNKETEREWKRPEGFKSINSNDFLIREEGKNDVKDDVLIKDRSFNGHHAEDAYFITIISQYFRSFKRIERLNVNYRKETRELDDLEKNNIKFKEKASFDNFLLINALDELNEKLNQMRFSRMVITKKNTQLFNETLYSGKYDKGKNTIKKVEKLNLLDNRTDKIKKIEEFFDEDKLKENELTKLHIFNHDKNLYETLKIIWNEVKIEIKNKNLNEKNYFKYFVNKKLQEGKISFNEWVPILDNDFKIIRKIRYIKFSSEEKETDEIIFSQSNFLKIDQRQNFSFHNTLYWVQIWVYKNQKDQYCFISIDARNSKFEKDEIKINYEKLKTQKEKLQIINEEPILKINKGDLFENEEKELFYIVGRDEKPQKLEIKYILGKKIKDQKQIQKPVKKYFPNWKKVNLTYMGEIFKK

SEQ ID NO: 110 - protein, 1269 aa, Mycoplasma gallisepticum
  CRISPR-associated endonuclease
  ref <308>: DATABASE ACCESSION NUMBER: YP_005880991, NCBI Gene Database
  ref <309>: DATABASE ENTRY DATE: 2013-06-11
MNNSIKSKPEVTIGLDLGVGSVGWAIVDNETNIIHHLGSRLFSQAKTAEDRRSFRGVRRLIRRRKYKLKRFVNLIWKYNSYFGFKNKEDILNNYQEQQKLHNTVLNLKSEALNAKIDPKALSWILHDYLKNRGHFYEDNRDFNVYPTKELAKYFDKYGYYKGIIDSKEDNDNKLEEELTKYKFSNKHWLEEVKKVLSNQTGLPEKFKEEYESLFSYVRNYSEGPGSINSVSPYGIYHLDEKEGKVVQKYNNIWDKTIGKCNIFPDEYRAPKNSPIAMIFNEINELSTIRSYSIYLTGWFINQEFKKAYLNKLLDLLIKTNGEKPIDARQFKKLREETIAESIGKETLKDVENEEKLEKEDHKWKLKGLKLNTNGKIQYNDLSSLAKFVHKLKQHLKLDFLLEDQYATLDKINFLQSLFVYLGKHLRYSNRVDSANLKEFSDSNKLFERILQKQKDGLFKLFEQTDKDDEKILAQTHSLSTKAMLLAITRMTNLDNDEDNQKNNDKGWNFEAIKNFDQKFIDITKKNNNLSLKQNKRYLDDRFINDAILSPGVKRILREATKVFNAILKQFSEEYDVTKVVIELARELSEEKELENTKNYKKLIKKNGDKISEGLKALGISEDEIKDILKSPTKSYKFLLWLQQDHIDPYSLKEIAFDDIFTKTEKFEIDHIIPYSISFDDSSSNKLLVLAESNQAKSNQTPYEFISSGNAGIKWEDYEAYCRKFKDGDSSLLDSTQRSKKFAKMMKTDTSSKYDIGFLARNLNDTRYATIVFRDALEDYANNHLVEDKPMFKVVCINGSVTSFLRKNFDDSSYAKKDRDKNIHHAVDASIISIFSNETKTLFNQLTQFADYKLFKNTDGSWKKIDPKTGVVTEVTDENWKQIRVRNQVSEIAKVIEKYIQDSNIERKARYSRKIENKTNISLFNDTVYSAKKVGYEDQIKRKNLKTLDIHESAKENKNSKVKRQFVYRKLVNVSLLNNDKLADLFAEKEDILMYRANPWVINLAEQIFNEYTENKKIKSQNVFEKYMLDLTKEFPEKFSEFLVKSMLRNKTAIIYDDKKNIVHRIKRLKMLSSELKENKLSNVIIRSKNQSGTKLSYQDTINSLALMIMRSIDPTAKKQYIRVPLNTLNLHLGDHDFDLHNMDAYLKKPKFVKYLKANEIGDEYKPWRVLTSGTLLIHKKDKKLMYISSFQNLNDVIEIKNLIETEYKENDDSDSKKKKKANRFLMTLSTILNDYILLDAKDNFDILGLSKNRIDEILNSKLGLDKIVK

SEQ ID NO: 111 - protein, 1270 aa, Mycoplasma gallisepticum; identical to SEQ ID NO: 66
  CRISPR-associated endonuclease
  ref <308>: DATABASE ACCESSION NUMBER: YP_005880236, NCBI Gene Database
  ref <309>: DATABASE ENTRY DATE: 2013-06-11

SEQ ID NO: 112 - protein, 1259 aa, Streptobacillus moniliformis
  CRISPR-associated endonuclease
  ref <308>: DATABASE ACCESSION NUMBER: YP_003306403, NCBI Gene Database
  ref <309>: DATABASE ENTRY DATE: 2013-06-10
MKYILGLDLGVASIGWAVTEINEKGEPVGLIDANSVIFKPLDNDKGKLYNVERRDKRGSRRILRRKKHRVERTKMLLVNSSFLTNEEIDNLYVGKLDNIYEVRLKGLKEQLSKNEIARLMIYYCKNRGFKSNRKTEDLEILKSLGEKISEKDSDEKKLKPIIAKNTELIESKGLTPIEVIYMIRENDNSILGFKNKEGNYKFGFKRNQVIDEVRKILGTQQILSKEIVDEYIDILSSQRDFSDGPGGDSKYKIDYTKLAGKCKYTGEVRAVKSAPSYEIFTMLQKLNDIRYVKFTSEDKIEKKKLSKEVIHKLYDLVVEKNKTLTYDLIEKSIDEENIKLLNIPKLSKSKYVELRKSYFKERNDNENLTEEEINAFNEKLNNERMKQELIRNNLKAYKELKSKFKKNNIDENRIKELGGIYFLDLVAELLTYSKTDEKLEYFVENVERYSLFKEQRDIVEIIKTFPNYTKNGNLSLSLVRELNKLLMEGHDYESSLSSLNYYIDTDVDWEKFPTISEIEDSLSTKITNPNVKHILVILRKLYNTLLFKYGRPEKVHLELSRDFSNDFSTRNKIQKEQLENKVRREVAAFEMYGANKDIVAGKDRLSNDDFVRIKLWEEQNKVCMYSGRTIEKYQLTSAEVQIDHILPYSKSFDNSYSNKVLVFSNENQDKKERTPYQWLKGTEKWNEFKQRVRLNLNISNKKKENLLFEDEVVNNEFLERELHATSYSSRLALNIFQRLIPVSDEDKYDEHGNEKVKYLYNRNVIAFQGKMTSMLRNLYSLNKYTHSFESDTLDIDNKAFILKEFEINKDNLKMTAYNVNTGLEITSETKVEKNKSGEFKTIKDELLKKELDKKENLIEISDYFKDKVLFDLKIVDFEEIDTVEPEIISILYKMITALKEEVYSKNRENHLHHSLDAFLLTIMNRSMQMKLIKYNQLISVLKNKEIEIFNEEKGEYIDSKEFAEELQKQKIIDIDGNERGIKFNVNGKTHRLNLVKPYENFLDDIKNKIFDKRENNKLPYHVVKSKVSGALHAETILGESKGEITKRISVFDINYKNLGKIFDKDGSQKEIYETLVKWLEAKSKDYPKLKNGNIIKKVKIVDGNKDKLIKLGNKRYVEMGRTTVKILVLKKEAEEGLKFASIGRYKYNLLKSEKDVNISIWKDAIHFCKVRYNKLKENGYRLIHELIPGETIELELNKGNISKCLVVGFSGGKIEISSVIGDALDLINDKISTRIKERYYITVSTIKSIKKINKNILGD

SEQ ID NO: 113 - protein, 1368 aa, Streptococcus pyogenes
  CRISPR-associated endonuclease
  ref <308>: DATABASE ACCESSION NUMBER: YP_002285828, NCBI Gene Database
  ref <309>: DATABASE ENTRY DATE: 2013-06-10
MDKKYSIGLDIGTNSVGWAVITDDYKVPSKKFKVLGNTDRHSIKKNLIGALLFDSGETAEATRLKRTARRRYTRRKNRICYLQEIFSNEIAKVDDSFFHRLEESFLVEEDKKHERHPIFGNIVDEVAYHEKYPTIYHLRKKLADSTDKADLRLIYLALAHMIKFRGHFLIEGDLNPDNSDVDKLFIQLVQTYNQLFEENPINASRVDAKAILSARLSKSRRLENLIAQLPGEKRNGLFGNLIALSLGLTPNFKSNFDLAEDAKLQLSKDTYDDDLDNLLAQIGDQYADLFLAAKNLSDAILLSDILRVNTEITKAPLSASMIKRYDEHHQDLTLLKALVRQQLPEKYKEIFFDQSKNGYAGYIDGGASQEEFYKFIKPILEKMDGTEELLAKLNREDLLRKQRTFDNGSIPHQIHLGELHAILRRQEDFYPFLKDNREKIEKILTFRIPYYVGPLARGNSRFAWMTRKSEETITPWNFEEVVDKGASAQSFIERMTNFDKNLPNEKVLPKHSLLYEYFTVYNELTKVKYVTEGMRKPAFLSGEQKKAIVDLLFKTNRKVTVKQLKEDYFKKIECFDSVEISGVEDRFNASLGTYHDLLKIIKDKDFLDNEENEDILEDIVLTLTLFEDREMIEERLKTYAHLFDDKVMKQLKRRRYTGWGRLSRKLINGIRDKQSGKTILDFLKSDGFANRNFMQLIHDDSLTFKEDLQKAQVSGQGDSLHEHIANLAGSPAIKKGILQTVKVVDELVKVMGRHKPENIVIEMARENQTTQKGQKNSRERMKRIEEGIKELGSDILKEYPVETTQLQNEKLYLYYLQNGRDMYVDQELDINRLSDYDVDHIVPQSFLKDDSIDNKVLTRSDKNRGKSDNVPSEEVVKKMKNYWKQLLNAKLITQRKFDNLTKAERGGLSELDKAGFIKRQLVETRQITKHVAQILDSRMNTKYDENDKLIREVRVITLKSKLVSDFRKDFQFYKVREINNYHHAHDAYLNAVVGTALIKKYPKLESEFVYGDYKVYDIRKMIAKSEQEIGKATAKYFFYSNIMNFFKTEITLANGEIRKRPLIETNGETGEIVWDKGRDFATVRKVLSMPQVNIVKKTEVQTGGFSKESILPKRNSDKLIARKKDWDPKKYGGFDSPTVAYSVLVVAKVEKGKSKKLKSVKELVGITIMERSSFEKDPVDFLEAKGYKEVRKDLIIKLPKYSLFELENGRKRMLASAGELQKGNELALPSKYVNFLYLASHYEKLKGSPEDNEQKQLFVEQHKHYLDEIIEQISEFSKRVILADANLDKVLSAYNKHRDKPIREQAENIIHLFTLTNLGAPAAFKCFDTTIGRNRYKSIKEVLDATLIHQSITGLYETRIDLSQLGGD

SEQ ID NO: 114 - protein, 984 aa, Campylobacter jejuni
  CRISPR-associated endonuclease
  ref <308>: DATABASE ACCESSION NUMBER: YP_001483000, NCBI Gene Database
  ref <309>: DATABASE ENTRY DATE: 2013-06-10
MARILAFDIGISSIGWAFSENDELKDCGVRIFTKAENPKTGESLALPRRLARSARKRLARRKARLNHLKHLIANEFKLNYEDYQSFDESLAKAYKGSLISPYELRFRALNELLSKQDFARVILHIAKRRGYDDIKNNGDEEKSEILKAIKQNEEKLVNYQSVGEYLYKEYFQKFKENSKEFINVRNKKESYERCITQSFLKDELKLIFQKQREFGFSFSKKFEEEVLSVAFYKRALKDFSHLVGNCSFFTDEKRAPKNSPLAFMFVALTRIINILNNLKNTEGILYTKDDLNALLNEVLKNGTLTYKQTKKLLGLSDDYEFKGEKGTYFIEFKKYKEFIKALGEHNLSQDDLNEIAKDITLIKDEIKLKKALAKYDLNQNQIDSLSKLEFKDHLNISFKALKLITPLMLEGKKYDEACNELNLKVAINEDKKDFLPAFNETYYKDEVTNPVVLRAIKEYRKILNALLKKYGKVHKINIELAREVGKNHSQRAKIEKEQNENYKAKKDAEIECEKLGLKINSKNILKLRLFKEQKEFCAYSGEKIKLSDLQDEKMLEIDHIYPYSRSFDDSYMNKVLVFTKQNQEKLNKTPFEAFGNDSTKWQKIEVLAKNLPEKKQKRILDKNYKDKEQKDFKDRNLNDTRYIARLVLNYTKDYLDFLPLSDDENTKLNDTQKGSKVHVEAKSGMLTSALRHTWGFSAKDRNNHLHHAIDAAIIAYANNSIVKAFSDFKKEQESNSVELYAKKISELDYKNKRKFFEPFSGFRQKVLDKIDEIFVSKPERKKPSGALHEETFRKEEEFYQSYGGKEGVLKALELGKIRKVNGKIVKNGDMFRVDIFKHKKTNKFYAVPIYTMDFALKVLPNKAVARSKKGEIKDWILMDENYEFCFSLYKDSLILIQTKDMQEPELVYFNAFTSSTVSLIVSKHDNKFETLSKNQKILFKNANEKEVIAKSIGIQNLKVFEKYIVSALGEVTKAEFRQREDFKK

SEQ ID NO: 115 - protein, 1123 aa, Francisella tularensis
  CRISPR-associated endonuclease
  ref <308>: DATABASE ACCESSION NUMBER: YP_666740, NCBI Gene Database
  ref <309>: DATABASE ENTRY DATE: 2013-06-10
MNVKILPIAIDLDVKNTGVFSAFYQKGTSLEKLDNKNGKVYELSKDSYTLLMNNRTARRHKRRGIDRKQLVKRLFKLVWTEQLNLEWDKDTQQAISFLFNRRGFSFITDGYSTEYLNIVPEQVKAILMDIFDDYNGEDDLDSYLKLATEQESKISEIYNKLMQKILEFKLRKLCTDIKDDKVSTKTLKEITSYEFELLADYLANYSESLKTQKFSYTDKQGNLKELSYYHHDKYNIQEFLKRHATINDEILGTLLTDDFDIWNFNFEKFDFDKNEEKLQNQEDKDHTQAHLHHFVFVVNKIKSEMASGGRHRSQYFQEITNVLDENNHQEGYLKNFCENLHNKKYSNLSVKNLVNLVGNLSNLELKPLRKYFNDKIHAKADHWDEQKFTETYCHWILGEWRVGVKDQDKKDGAKYSYKDLCNELKQKVTKAGLIDFLLELDPCRTIPPYLDNNNRKPPKCQSLILNPKFLDNQYPNWQQYLQELKKLQSIQDYLDSFETDLKDLKSSKDQPYFVEYKSSNQQMASGQRDYKDLDARILQFIFDRVKASDELLLNEIYFQAKKLKQKASSELEKLESSKKLDEVIANSQLSQILKSQHTNGIFEQGTFLHLVCKYYKQRQRARDSRLYIMPEYRYDKKLDKYNNTGRFDDNNQLLTYCNHKPRQKRYQLLNDLAGVLQVSRNQLLSSVEEWFQQAQRVGEISKSQDEQIFEWLKSFKIASYCKAAVEMQKQYRGTLKNAIQTAIFRQSENINKNKNTGNQQQALSENSKDVKSLTADEKKLLKLIENIAKASQKIGESLGLNDKQIKKFNSIYSFAQIQQIAFAKRKGNANTCAVCSADNAHRMQQIKITELVEDNKDNIILSAKAQRLPAIPTRIVDGAVKKMATILAKNIVDDNWQNIKQVLSAKHQLHIPIITESNAFEFEPALADVKGKSLKDRRKKALERISPENIFKDKNNRIKEFAKGISAYSGANLTDGDFDGAKEELDHIIPRSHKKYGTLNDEANLICVTRDDNKNIFAIDTSKWFEIETPSDLRDIGVATIQYKIDNNSRPKVRVKLDYVIDDDSKINYFMNHSLLKSRYPDKVLEILKQSTIIEFESSGFNKTIKEMLGMTLAGIYNETSNN

SEQ ID NO: 116 - protein, 1123 aa, Francisella tularensis; identical to SEQ ID NO: 115
  CRISPR-associated endonuclease
  ref <308>: DATABASE ACCESSION NUMBER: YP_169608, NCBI Gene Database
  ref <309>: DATABASE ENTRY DATE: 2014-05-16

SEQ ID NO: 117 - protein, 1371 aa, Streptococcus dysgalactiae
  CRISPR-associated endonuclease
  ref <308>: DATABASE ACCESSION NUMBER: YP_006859751, NCBI Gene Database
  ref <309>: DATABASE ENTRY DATE: 2013-08-27
MDKKYSIGLDIGTNSVGWAVITDDYKVPSKKFKVLGNTDRHSIKKNLIGALLFDSGETAEATRLKRTARRRYTRRKNRIRYLQEIFSSEMSKVDDSFFHRLEESFLVEEDKKHERHPIFGNIVDEVAYHEKYPTIYHLRKKLADSTDKADLRLIYLALAHMIKFRGHFLIEGDLNPDNSDMDKLFIQLVQTYNQLFEENPINASRVDAKAILSARLSKSRRLENLIAQLPGEKRNGLFGNLIALSLGLTPNFKSNFDLAEDAKLQLSKDTYDDDLDNLLAQIGDQYADLFLAAKNLSDAILLSDILRVNSEITKAPLSASMIKRYDEHHQDLTLLKALVRQQLPEKYKEIFFDQSKNGYAGYIDGGASQEEFYKFIKPILEKMDGTEELLAKLNREDLLRKQRTFDNGSIPHQIHLGELHAILRRQEDFYPFLKDNREKIEKILTFRIPYYVGPLARGNSRFAWMTRKSEETITPWNFEEVVDKGASAQSFIERMTNFDKNLPNEKVLPKHSLLYEYFTVYNELTKVKYVTEGMRKPEFLSGKQKEAIVDLLFKTNRKVTVKQLKEDYFKKIECFDSVEISGVEDRFNASLGTYHDLLKIIKDKDFLDNEENEDILEDIVLTLTLFEDKEMIEERLKTYAHLFDDKVMKQLKRRHYTGWGRLSRKLINGIRDKQSGKTILDFLKSDGFANRNFIQLIHDDSLTFKEAIQKAQVSGQGHSLHEQIANLAGSPAIKKGILQSVKVVDELVKVMGHKPENIVIEMARENQTTQKGQKNSRERMKRIEEGIKELGSQILKEHPVENTQLQNEKLYLYYLQNGRDMYVDQELDINRLSDYDVDHIVPQSFIKDDSIDNKVLTRSDKNRGKSDDVPSEEVVKKMKNYWRQLLNAKLITQRKFDNLTKAERGGLSELDKAGFIKRQLVETRQITKHVAQILDSRMNTKYDENDKLIREVKVITLKSKLVSDFRKDFQFYKVREINNYHHAHDAYLNAVVGTALIKKYPKLESEFVYGDYKVYDVRKMIAKSEQEIGKATAKRFFYSNIMNFFKTEITLANGEIRKRPLIETNEETGEIVWNKGRDFATVRKVLSMPQVNIVKKTEVQTGALTNESIYARGSFDKLISRKHRFESSKYGGFGSPTVTYSVLVVAKSKVQDGKVKKIKTGKELIGITLLDKLVFEKNPLKFIEDKGYGNVQIDKCIKLPKYSLFEFENGTRRMLASVMANNNSRGDLQKANEMFLPAKLVTLLYHAHKIESSKELEHEAYILDHYNDLYQLLSYIERFASLYVDVEKNISKVKELFSNIESYSISEICSSVINLLTLTASGAPADFKFLGTTIPRKRYGSPQSILSSTLIHQSITGLYETRIDLSQLGGD

SEQ ID NO: 118 - protein, 1345 aa, Streptococcus mutans
  CRISPR-associated endonuclease
  ref <308>: DATABASE ACCESSION NUMBER: YP_006490549, NCBI Gene Database
  ref <309>: DATABASE ENTRY DATE: 2013-06-11
MKKPYSIGLDIGTNSVGWAVVTDDYKVPAKKMKVLGNTDKSHIKKNLLGALLFDSGNTAEDRRLKRTARRRYTRRRNRILYLQEIFSEEMGKVDDSFFHRLDESFLTDDDKNFDSHPIFGNKAEEDAYHQKFPTIYHLRKHLADSTEKADLRLVYLALAHMIKFRGHFLIEGELNAENTDVQKLFADFVGVYDRTFDDSHLSEITVDASSILTEKISKSRRLEKLINNYPKEKKNTLFGNLIALSLGLQPNFKTNFKLSEDAKLQFSKDTYEEELEVLLAQIGDNYAELFLSAKKLYDSILLSGILTVTDVSTKAPLSASMIQRYNEHQMDLAQLKQFIRQKLSDKYNEVFSDVSKDGYAGYIDGKTNQEAFYKYLKGLLNKIEGSGYFLDKIEREDFLRKQRTFDNGSIPHQIHLQEMRAIIRRQAEFYPFLADNQDRIEKILTFRIPYYVGPLARGKSDFAWLSRKSADKITPWNFDEIVDKESSVEAFINRMTNYDLYLPNQKVLPKHSLLYEKFTVYNELTKVKYKTEQGKTAFFDANMKQEIFDGVFKVYRKVTKDKLMDFLEKEFDEFRIVDLTGLDKENKAFNASYGTYHDLRKILDKDFLDNSKNEKILEDIVLTLTLFEDREMIRKRLKNYSDLLTKEQLKKLERRHYTGWGRLSAELIHGIRNKESRKTILDYLIDDGNSNRNFMQLINDDALSFKEEIAKAQVIGETDNLNQVVSDIAGSPAIKKGILQSLKIVDELVKIMGHQPENIVVEMARENQFTNQGRRNSQQRLKGLTDSIKEFGSQILKEHPVENSQLQNDRLFLYYLQNGRDMYTGEELDIDYLSQYDIDHIIPQAFIKDNSIDNRVLTSSKENRGKSDDVPSKDVVRKMKSYWSKLLSAKLITQRKFDNLTKGERGGLTDDDKAGFIKRQLVETRQITKHVARILDERFNTETDENNKKIRQVKIVTLKSNLVSNFRKEFELYKVREINDYHHAHDAYLNAVIGKALLGVYPQLEPEFVYGDYPHFHGHKENKATAKKFFYSNIMNFFKKDDVRTDKNGEIIWKKDEYISNIKKVLSYPQVNIVKKVEEQTGGFSKESILPKGDSDKLIPRKTKKFYWDTKKYGGFDSPIVAYSILVIADIEKGKSKKLKTVKALVGVTIMEKMTFERDPVAFLERKGYRNVQEENIIKLPKYSLFKLENGRKRLLASARELQKGNEIVLPNHLGTLLYHAKNIHKVDEPKHLDYVDKHKDEFKELLDVVSNFSKKYTLAEGNLEKIKELYAQNNGEDLKELASSFINLLTFTAIGAPATFKFFDKNIDRKRYTSTTEILNATLIHQSITGLYETRIDLSKLGGD

SEQ ID NO: 119 - protein, 1388 aa, Streptococcus thermophilus
  CRISPR-associated endonuclease
  ref <308>: DATABASE ACCESSION NUMBER: YP_006340526, NCBI Gene Database
  ref <309>: DATABASE ENTRY DATE: 2013-06-11
MTKPYSIGLDIGTNSVGWAVITDNYKVPSKKMKVLGNTSKKYIKKNLLGVLLFDSGITAEGRRLKRTARRRYTRRRNRILYLQEIFSTEMATLDDAFFQRLDDSFLVPDDKRDSKYPIFGNLVEEKAYHDEFPTIYHLRKYLADSTKKADLRLVYLALAHMIKYRGHFLIEGEFNSKNNDIQKNFQDFLDTYNAIFESDLSLENSKQLEEIVKDKISKLEKKDRILKLFPGEKNSGIFSEFLKLIVGNQADFRKCFNLDEKASLHFSKESYDEDLETLLGYIGDDYSDVFLKAKKLYDAILLSGFLTVTDNETEAPLSSAMIKRYNEHKEDLALLKEYIRNISLKTYNEVFKDDTKNGYAGYIDGKTNQEDFYVYLKNLLAEFEGADYFLEKIDREDFLRKQRTFDNGSIPYQIHLQEMRAILDKQAKFYPFLAKNKERIEKILTFRIPYYVGPLARGNSDFAWSIRKRNEKITPWNFEDVIDKESSAEAFINRMTSFDLYLPEEKVLPKHSLLYETFNVYNELTKVRFIAESMRDYQFLDSKQKKDIVRLYFKDKRKVTDKDIIEYLHAIYGYDGIELKGIEKQFNSSLSTYHDLLNIINDKEFLDDSSNEAIIEEIIHTLTIFEDREMIKQRLSKFENIFDKSVLKKLSRRHYTGWGKLSAKLINGIRDEKSGNTILDYLIDDGISNRNFMQLIHDDALSFKKKIQKAQIIGDEDKGNIKEVVKSLPGSPAIKKGILQSIKIVDELVKVMGGRKPESIVVEMARENQYTNQGKSNSQQRLKRLEKSLKELGSKILKENIPAKLSKIDNNALQNDRLYLYYLQNGKDMYTGDDLDIDRLSNYDIDHIIPQAFLKDNSIDNKVLVSSASNRGKSDDFPSLEVVKKRKTFWYQLLKSKLISQRKFDNLTKAERGGLLPEDKAGFIQRQLVETRQITKHVARLLDEKFNNKKDENNRAVRTVKIITLKSTLVSQFRKDFELYKVREINDFHHAHDAYLNAVIASALLKKYPKLEPEFVYGDYPKYNSFRERKSATEKVYFYSNIMNIFKKSISLADGRVIERPLIEVNEETGESVWNKESDLATVRRVLSYPQVNVVKKVEEQNHGLDRGKPKGLFNANLSSKPKPNSNENLVGAKEYLDPKKYGGYAGISNSFAVLVKGTIEKGAKKKITNVLEFQGISILDRINYRKDKLNFLLEKGYKDIELIIELPKYSLFELSDGSRRMLASILSTNNKRGEIHKGNQIFLSQKFVKLLYHAKRISNTINENHRKYVENHKKEFEELFYYILEFNENYVGAKKNGKLLNSAFQSWQNHSIDELCSSFIGPTGSERKGLFELTSRGSAADFEFLGVKIPRYRDYTPSSLLKDATLIHQSVTGLYETRIDLAKLGEG

SEQ ID NO: 120 - protein, 1121 aa, Streptococcus thermophilus
  CRISPR-associated endonuclease
  ref <308>: DATABASE ACCESSION NUMBER: YP_006339747, NCBI Gene Database
  ref <309>: DATABASE ENTRY DATE: 2013-06-11
MSDLVLGLDIGIGSVGVGILNKVTGEIIHKNSRIFPAAQAENNLVRRTNRQGRRLTRRKKHRRVRLNRLFEESGLITDFTKISINLNPYQLRVKGLTDELSNEELFIALKNMVKHRGISYLDDASDDGNSSVGDYAQIVKENSKQLETKTPGQIQLERYQTYGQLRGDFTVEKDGKKHRLINVFPTSAYRSEALRILQTQQEFNPQITDEFVNRYLEILTGKRKYYHGPGNEKSRTDYGRYRTNGETLDNIFGILIGKCTFYPEEFRAAKASYTAQEFNLLNDLNNLTVPTETKKLSKEQKNQIINYVKNEKAMGPAKLFKYIAKLLSCDVADIKGYRIDKSGKAEIHTFEAYRKMKTLETLDIEQMDRETLDKLAYVLTLNTEREGIQEALEHEFADGSFSQKQVDELVQFRKANSSIFGKGWHNFSVKLMMELIPELYETSEEQMTILKRLGKQKTTSSSNKTKYIDEKLLTEEIYNPVVAKSIRQAIKIVNAAIKEYGDFDNIVIEMARETNEDDEKKAIQKIQKANKDEKDAAMLKAANQYNGKAELPHSVFHGHKQLATKIRLWHQQGERCLYTGKTISIHDLINNPNQFEVDHILPLSITFDDSLANKVLVYATANQEKGQRTPYQALDSMDDAWSFRELKAFVRESKTLSNKKKEYLLTEEDISKFDVRKKFIERNLVDTRYASRVVLNALQEHFRAHKIDTKVSVVRGQFTSQLRRHWGIEKTRDTYHHHAVDALIIAASSQLNLWKKQKNTLVSYSEDQLLDIETGELISDDEYKESVFKAPYQHFVDTLKSKEFEDSILFSYQVDSKFNRKISDATIYATRQAKVGKDKKDETYVLGKIKDIYTQDGYDAFMKIYKKDKSKFLMYRHDPQTFEKVIEPILENYPNKEMNEKGKEVPCNPFLKYKEEHGYIRKYSKKGNDPEIKSLKYYDSKLGNHIDITPKDSNNKVVLQSVSPWRADVYFNKTTGKYEILGLKYADLQFEKGTGTYKISQEKYNDIKKKEGVDSDSEFKFTLYKNDLLLVKDTETKEQQLFRFLSRTMPKQKHYVELKPYDKQKFEGGEALIKVLGNVANSGQCKKGLGKSNISIYKVRTDVLGNQHIIKNEGDKPKLDF

SEQ ID NO: 121 - protein, 1127 aa, Streptococcus salivarius
  CRISPR-associated endonuclease
  ref <308>: DATABASE ACCESSION NUMBER: YP_006069875, NCBI Gene Database
  ref <309>: DATABASE ENTRY DATE: 2013-06-11
MSDLVLGLDIGIGSVGVGILNKVTGEIIHKNSRIFPAAQAENNVERRINRQGRRLTRRKKHRRVRLNHLFEESGLITDFTNVSINLNPYQLRVKGLTDELSNEELFIALKNMVKHRGISYLDDASDDGNSSVGDYAQIVKENSKQLETKTPGQIQLERYQKYGQLRGDFTVEEDGKKHRLINVFPTSAYRAEALRILQTQQEFNPQITDEFINSYLQILTGKRKYYHGPGNEKSRTDYGRYTTKKDSEDEYITLDNIFGILIGKCTFYPEEYRAAKASYTAQEFNLLNDLNNLTVPTETKKLSEEQKNQIITNVKNEKAMGPAKLFKYIAKLLSCDVADIKGYRIDKSDKAEIHTFEAYRKMKTLATIDIEQMERENLDKLAYVLTLNTEKEGIQEALEHEFADGTFSQEQIDELVQFRKANSSIFGKGWHSFSVKLMMELIPELYATSEEQMTILTRLGKQKTTSSSNKTKYIDEKQLTEEIYNPVAAKSVRQAIKIVNAAIKEYGDFDNIVIEMARETNEDDEKKAIQKIQKANKDEKDAAMLKAANQYNGKAELPHSVFHGHKQLATKIRLWHQQGERCLYTGKTISIHDLINNSNQFEIDHILPLSITFDDSLANKVLVYATANQEKGQRTPYQALDSMDDAWSFRELKAFVRDSKALSNKKKEYLLTEEDISKFDVRKKFIERNLVDTRYASRVVLNALQEHFRVHKTDTKVSVVRGQFTSQLRRHWGIEKTRDTYHHHAVDALIIAASSQLNLWKKQKNTLVSYSEDQLLDIETGELISDDEYKESVFKAPYQHFVDTLKSKEFEDSILFSYQVDSKFNRKISDATIYATRQAKVGKDKKDETYVLGKIKDIYSQTGYDAFIKIYKKDKSKFLMYRHDPQTFEKVIEPILENYPNKELNEKGKEVPCNPFLKYKEDHGYIRKYSKKGNGPEIKSLKYYDSKLGNHIDITPKNSNNKVVLQSVSPWRADVYFNKTTGKYEILGLKYADLKFEKGTGTYKISEEKYNDIKIKEGVDSDSEFKFTLYKNDLLLIKDTETKEQQLFRFLSRTMPNVKHYVELKPYDKQKFDDNEELIKILGIVAKGGQCKKGVSKPNISIYKIRTDVLGNQHIIKNEGDKPKLDF

SEQ ID NO: 122 - protein, 1345 aa, Streptococcus mutans
  CRISPR-associated endonuclease
  ref <308>: DATABASE ACCESSION NUMBER: YP_006250978, NCBI Gene Database
  ref <309>: DATABASE ENTRY DATE: 2013-06-11
MKKPYSIGLDIGTNSVGWAVVTDDYKVPDKKMKVLGNTDKSHIKKNLLGALLFDSGNTAEDRRLKRTARRRYTRRRNRILYLQEIFSEEMGKVDDSFFHRLEDSFLVTEDKRGERHPIFGNLEEEVKYHENFPTIYHLRQYLADNPEKTDLRLVYLALAHIIKFRGHFLIEGKFDTRNNDVQRLFQEFLAVYDNTFENSSLQEQNVQVEEILTDKISKSAKKDRVLKLFPNEKSNGRFAEFLKLIVGNQADFKKHFELEEKAPLQFSKDIYEEELEVLLAQIGDNYAELFLSAKKLYDSILLSGILTVTDVSTKAPLSASMIQRYNEHQMDLAQLKQFIRQKLSDKYNEVFSDVSKDGYAGYIDGKTNQEAFYKYLKGLLNKIEGSGYFLDKIEREDFLRKQRTFDNGSIPHQIHLQEMRAIIRRQAEFYPFLADNQDRIEKILTFRIPYYVGPLARGKSDFAWLSRKSADKITPWNFDEIVDKESSVEAFINRMTNYDLYLPNQKVLPKHSLLYEKFTVYNELTKVKYKTEQGKTAFFDANMKQEIFDGVFKVYRKVTKDKLMDFLEKEFDEFRIVDLTGLDKENKAFNASYGTYHDLRKILDKDFLDNSKNEKILEDIVLTLTLFEDREMIRKRLKNYSDLLTKEQLKKLERRHYTGWGRLSAELIHGIRNKESRKTILDYLIDDGNSNRNFMQLINDDALSFKEEIAKAQVIGETDNLNQVVSDIAGSPAIKKGILQSLKIVDELVKIMGHQPENIVVEMARENQFTNQGRRNSQQRLKGLTDSIKEFGSQILKEHPVENSQLQNDRLFLYYLQNGRDMYTGEELDIDYLSQYDIDHIIPQAFIKDNSIDNRVLTSSKENRGKSDDVPSKDVVRKMKSYWSKLLSAKLITQRKFDNLTKAERGGLTDDDKAGFIKRQLVETRQITKHVARILDERFYTETDENNKKIRQVKIVTLKSNLVSNFRKEFELYKVREINDYHHAHDAYLNAVIGKALLGVYPQLEPEFVYGDYPHFHGHKENKATAKKFFYSNIMNFFKKDDVRTDKNGEIIWKKDEHISNIKKVLSYPQVNIVKKVEEQTGGFSKESILPKGNSDKLIPRKTKKFYWDTKKYGGFDSPIVAYSILVIADIEKGKSKKLKTVKALVGVTIMEKMTFERDPVAFLERKGYRNVQEENIIKLPKYSLFKLENGRKRLLASARELQKGNEIVLPNHLGTLLYHAKNIHKVDEPKHLDYVDKHKDEFKELLDVVSNFSKKYTLAEGNLEKIKELYAQNNGEDLKELASSFINLLTFTAIGAPATFKFFDKNIDRKRYTSTTEILNATLIHQSITGLYETRIDLSKLGGD

SEQ ID NO: 123 - protein, 1400 aa, Riemerella anatipestifer
  CRISPR-associated endonuclease
  ref <308>: DATABASE ACCESSION NUMBER: YP_006017889, NCBI Gene Database
  ref <309>: DATABASE ENTRY DATE: 2013-06-11
MKTILGLDLGTNSIGWALVKETENSNEKSEIIKLGVRVNPLTVDEKTNFEAGRPLSTNADRTAKRSARRNLQRYKLRRKNLIDLLIKHRLIDKDTPLTEIGKNTTHQTLELRAKAARERIELEDLARVFLAINKKRGYRSSRKVNNEEEGQVVDGMAVAKKLYDENLTPGQYAYELLSKGKKYVPDFYRSDLQAEFDSIWEYQKQFYADILDDELYNALKGQGQQNSRKRFLAIKGVYTAENKGKRDEVKLQHYKWRSEAITQKLSIEEVAYVLVEINNDLNKSSGYLGAISDRSKELYFNKETVGENLWKQIQKNPHTSLKNQVFYRQDYLDEFEQIWETQAQFHPQLTLALKEQIRDVVIFYQRKLKSQKGLLSFCQFESWEIERKDENGNVILNKTTQLPKRQTVGRRVAPKSSPLFQEFKIWQNINNLEIAKISDGNSKNKKETEALSDDERKLLFEELNLRGNLSQKEVLQILGLKDKEYKTNFPEGLEGNRTNAALFNIYQQIAENEGYGDWTKKSAQEIKEELKAVFPQIGIQADILDFNAELDGKEFENQASYQLWHLLYSAEEDDKINEEDQIIYGNSAVSLKKKLCEKFGFTPEYAKWIANVSLQDDYGNLSTKAMRKIIPYLIDGNDYSEACALAGYNHSNSLTKEENDNRERLNKLELLPKNSLRNPVVEKILNQMVNVVNQVIETYGKPDEVRIELARELKKSAEERAEMTKGINEATRRNEDIKKLITKNFGIPNPTKNDVVRYRLWEELAPLAYKDVFTGRQIKKEDLFSSKIDIEHIIPKALLFDDSFSNKTLAFRETNLKKADRTAYGFIESDYNATLDDYIQRVETLYNNAKGTISKGKRNKLLMAQKNLPDGFIERDLRNSQYIAKKAKSMIEKVFNDVNVTSGSITDRLREDWDLINVMKELNFPKYKALGLTEIEERYDIGQEKTKKVEVITDWTKRNDHRHHAMDALTVAFTTKSHVQYLNNLNTIHSLKGDEVDLELSKLYGLKNTITEVVNKKRKFIPPMPNFREEAKKHIETILVSIKNKNKVYTKNINKTKKESGYHTKEQLTPRGQLHKETVYGKSKRPMNKPTKINKNFSLEQAQLIINVQEKELVLRHLAQFDNNPAVAFDTKTLKKMPLLKNGEPLKEVLCFEEIFTIRKDITPDLKIEKVVDEKIKAILEQRKKDFGGNAKEAFSDLDKNPIWLNKEKGICIKRVTITGVSNAEALHHQKDHLGREILDDNGNPIPADFVSTGNNHHVAIYEDEKGKLQEKVVSLYEAVARANQGLPVVDKGLNEDLGWKFLFTMKQNEMFVFPNDDFDVNDIDLLDENNAKIISQHLFRVQKLATKNYMFRHHLETNVQEVKELNDIAYKSIRSTEPLKNIKKVRINHIGKIVQVGEY

SEQ ID NO: 124 - protein, 1121 aa, Streptococcus thermophilus
  CRISPR-associated endonuclease
  ref <308>: DATABASE ACCESSION NUMBER: YP_006002222, NCBI Gene Database
  ref <309>: DATABASE ENTRY DATE: 2013-06-11
MSDLVLGLDIGIGSVGVGILNKVTGEIIHKNSRIFPAAQAENNLVRRTNRQGRRLTRRKKHRIVRLNRLFEESGLITDFTKISINLNPYQLRVKGLTDELSNEELFIALKNMVKHRGISYLDDASDDGNSSVGDYAQIVKENSKQLETKTPGQIQLERYQTYGQLRGDFTVEKDGKKHRLINVFPTSAYRSEALRILQTQQEFNPQITDEFINRYLEILTGKRKYYHGPGNEKSRTDYGRYRTSGETLDNIFGILIGKCTFYPDEFRAAKASYTAQEFNLLNDLNNLTVPTETKKLSKEQKNQIINYVKNEKAMGPAKLFKYIAKLLSCDVADIKGYRIDKSGKAEIHTFEAYRKMKTLETLDIEQMDRETLDKLAYVLTLNTEREGIQEALEHEFADGSFSQKQVDELVQFRKANSSIFGKGWHNFSVKLMMELIPELYETSEEQMTILTRLGKQKTTSSSNKTKYIDEKLLTEEIYNPVVAKSVRQAIKIVNAAIKEYGDFDNIVIEMARETNEDDEKKAIQKIQKANKDEKDAAMLKAANQYNGKAELPHSVFHGHKQLATKIRLWHQQGERCLYTGKTISIHDLINNSNQFEVDHILPLSITFDDSLANKVLVYATANQEKGQRTPYQALDSMDDAWSFRELKAFVRESKTLSNKKKEYLLTEEDISKFDVRKKFIERNLVDTRYASRVVLNALQEHFRAHKIDTKVSVVRGQFTSQLRRHWGIEKTRDTYHHHAVDALIIAASSQLNLWKKQKNTLVSYSEDQLLDIETGELISDDEYKESVFKAPYQHFVDTLKSKEFEDSILFSYQVDSKFNRKISDATIYATRQAKVGKDKADETYVLGKIKDIYTQDGYDAFMKIYKKDKSKFLMYRHDPQTFEKVIEPILENYPNKQMNEKGKEVPCNPFLKYKEEHGYIRKYSKKGNGPEIKSLKYYDSKLGNHIDITPKDSNNKVVLQSVSPWRADIYFNNTTGKYEILGLKYADLQFEKGTGTYKISQEKYNDIKKKEGVDSDSEFKFTLYKNDLLLVKETETKEQQLFRFLSRTMPKQKHYVELKPYDKQKFEGGEALIKVLGNVANGGQCIKGLGKSNISIYKVRTDVLGNQHIIKNEGDKPKLDF

SEQ ID NO: 125 - protein, 1145 aa, Riemerella anatipestifer
  CRISPR-associated endonuclease
  ref <308>: DATABASE ACCESSION NUMBER: YP_005394506, NCBI Gene Database
  ref <309>: DATABASE ENTRY DATE: 2013-07-06
MKTILGLDLGTNSIGWALVKETENSNEKSEIIKLGVRVNPLTVDEKTNFEAGRPLSTNADRTAKRSARRNLQRYKLRRKNLIDLLIKHRLIDKDTPLTEIGKNTTHQTLELRAKAARERIELEDLARVFLAINKKRGYRSSRKVNNEEEGQVVDGMAVAKKLYDENLTPGQYAYELLSKGKKYVPDFYRSDLQAEFDSIWEYQKQFYADILDDELYNALKGQGQQNSRKRFLAIKGVYTAENKGKRDEVKLQHYKWRSEAITQKLSIEEVAYVLVEINNDLNKSSGYLGAISDRSKELYFNKETVGENLWKQIQKNPHTSLKNQVFYRQDYLDEFEQIWETQAQFHPQLTLALKEQIRDVVIFYQRKLKSQKGLLSFCQFESWEIERKDENGNVILNKTTQLPKRQTVGRRVAPKSSPLFQEFKIWQNINNLEIAKISDGNSKNKKETEALSDDERKLLFEELNLRGNLSQKEVLQILGLKDKEYKTNFPEGLEGNRTNAALFNIYQQIAENEGYGDWTKKSAQEIKEELKAVFPQIGIQADILDFNAELDGKEFENQASYQLWHLLYSAEEDDKINEEDQIIYGNSAVSLKKKLCEKFGFTPEYAKWIANVSLQDDYGNLSTKAMRKIIPYLIDGNDYSEACALAGYNHSNSLTKEENDNRERLNKLELLPKNSLRNPVVEKILNQMVNVVNQVIETYGKPDEVRIELARELKKSAEERAEMTKGINEATRRNEDIKKLITKNFGIPNPTKNDVVRYRLWEELAPLAYKDVFTGRQIKKEDLFSSKIDIEHIIPKALLFDDSFSNKTLAFRETNLKKADRTAYGFIESDYNATLDDYIQRVETLYNNAKGTISKGKRNKLLMAQKNLPDGFIERDLRNSQYIAKKAKSMIEKVFNDVNVTSGSITDRLREDWDLINVMKELNFPKYKALGLTEIEERYDIGQEKTKKVEVITDWTKRNDHRHHAMDALTVAFTTKSHVQYLNNLNTIHSLKGDEVDLELSKLYGLKNTITEVVNKKRKFIPPMPNFREEAKKHIETILVSIKNKNKVYTKNINKTKKESGYHTKEQLTPRGQLHKETVYGKSKRPMNKPTKINKNFSLEQAQLIINVQEKELVLRHLAQFDNNPAVAFDTKTLKKCHYLKMVNL

SEQ ID NO: 126 - protein, 1375 aa, Streptococcus infantarius
  CRISPR-associated endonuclease
  ref <308>: DATABASE ACCESSION NUMBER: YP_005204039, NCBI Gene Database
  ref <309>: DATABASE ENTRY DATE: 2013-06-11
MEKSYSIGLDIGTNSVGWAVITDDYKVPAKKMKVLGNTDKKYIKKNLLGALLFDSGETAEVTRLKRTARRRYTRRKNRLRYLQEIFAKEMTKVDESFFQRLEESFLTDDDKTFDSHPIFGNKAEEDAYHQKFPTIYHLRKYLADSQEKADLRLVYLALAHMIKYRGHFLIEGELNAENTDVQKLFNVFVETYDKIVDESHLSEIEVDASSILTEKVSKSRRLENLIKQYPTEKKNTLFGNLIALALGLQPNFKTNFKLSEDAKLQFSKDTYEEDLEELLGKVGDDYADLFISAKNLYDAILLSGILTVDDNSTKAPLSASMIKRYVEHHEDLEKLKEFIKINKLKLYHDIFKDKTKNGYAGYIDNGVKQDEFYKYLKTILTKIDDSDYFLDKIERDDFLRKQRTFDNGSIPHQIHLQEMHSILRRQGDYYPFLKENQAKIEKILTFRIPYYVGPLARKDSRFAWANYHSDEPITPWNFDEVVDKEKSAEKFITRMTLNDLYLPEEKVLPKHSHVYETFTVYNELTKIKYVNEQGESFFFDANMKQEIFDHVFKENRKVTKAKLLSYLNNEFEEFRINDLIGLDKDSKSFNASLGTYHDLKKILDKSFLDDKTNGQIIEDIVLTLTLFEDRDMIHERLQKYSDFFTSQQLKKLERRHYTGWGRLSYKLINGIRNKENNKTILDFLIDDGHANRNFMQLINDESLSFKTIIQEAQVVGDVDDIEAVVHDLPGSPAIKKGILQSVKIVDELVKVMGDNPDNIVIEMARENQTTGYGRNKSNQRLKRLQDSLKEFGSDILSKKKPSYVDSKVENSHLQNDRLFLYYIQNGKDMYTGEELDIDRLSDYDIDHIIPQAFIKDNSIDNKVLTSSAKNRGKSDDVPSIEIVRNRRSYWYKLYKSGLISKRKFDNLTKAERGGLTEADKAGFIKRQLVETRQITKHVAQILDARFNTKRDENDKVIRDVKVITLKSNLVSQFRKEFKFYKVREINDYHHAHDAYLNAVVGTALLKKYPKLTPEFVYGEYKKYDVRKLIAKSSDDYSEMGKATAKYFFYSNLMNFFKTEVKYADGRVFERPDIETNADGEVVWNKQKDFDIVRKVLSYPQVNIVKKVEAQTGGFSKESILSKGDSDKLIPRKTKKVYWNTKKYGGFDSPTVAYSVLVVADIEKGKAKKLKTVKELVGISIMERSFFEENPVSFLEKKGYHNVQEDKLIKLPKYSLFEFEGGRRRLLASATELQKGNEVMLPAHLVELLYHAHRIDSFNSTEHLKYVSEHKKEFEKVLSCVENFSNLYVDVEKNLSKVRAAAESMTNFSLEEISASFINLLTLTALGAPADFNFLGEKIPRKRYTSTKECLSATLIHQSVTGLYETRIDLSKLGEE

SEQ ID NO: 127 - protein, 1132 aa, Nitratifractor salsuginis
  CRISPR-associated endonuclease
  ref <308>: DATABASE ACCESSION NUMBER: YP_004168469, NCBI Gene Database
  ref <309>: DATABASE ENTRY DATE: 2013-07-06
MKKILGVDLGITSFGYAILQETGKDLYRCLDNSVVMRNNPYDEKSGESSQSIRSTQKSMRRLIEKRKKRIRCVAQTMERYGILDYSETMKINDPKNNPIKNRWQLRAVDAWKRPLSPQELFAIFAHMAKHRGYKSIATEDLIYELELELGLNDPEKESEKKADERRQVYNALRHLEELRKKYGGETIAQTIHRAVEAGDLRSYRNHDDYEKMIRREDIEEEIEKVLLRQAELGALGLPEEQVSELIDELKACITDQEMPTIDESLFGKCTFYKDELAAPAYSYLYDLYRLYKKLADLNIDGYEVTQEDREKVIEWVEKKIAQGKNLKKITHKDLRKILGLAPEQKIFGVEDERIVKGKKEPRTFVPFFFLADIAKFKELFASIQKHPDALQIFRELAEILQRSKTPQEALDRLRALMAGKGIDTDDRELLELFKNKRSGTRELSHRYILEALPLFLEGYDEKEVQRILGFDDREDYSRYPKSLRHLHLREGNLFEKEENPINNHAVKSLASWALGLIADLSWRYGPFDEIILETTRDALPEKIRKEIDKAMREREKALDKIIGKYKKEFPSIDKRLARKIQLWERQKGLDLYSGKVINLSQLLDGSADIEHIVPQSLGGLSTDYNTIVTLKSVNAAKGNRLPGDWLAGNPDYRERIGMLSEKGLIDWKKRKNLLAQSLDEIYTENTHSKGIRATSYLEALVAQVLKRYYPFPDPELRKNGIGVRMIPGKVTSKTRSLLGIKSKSRETNFHHAEDALILSTLTRGWQNRLHRMLRDNYGKSEAELKELWKKYMPHIEGLTLADYIDEAFRRFMSKGEESLFYRDMFDTIRSISYWVDKKPLSASSHKETVYSSRHEVPTLRKNILEAFDSLNVIKDRHKLTTEEFMKRYDKEIRQKLWLHRIGNTNDESYRAVEERATQIAQILTRYQLMDAQNDKEIDEKFQQALKELITSPIEVTGKLLRKMRFVYDKLNAMQIDRGLVETDKNMLGIHISKGPNEKLIFRRMDVNNAHELQKERSGILCYLNEMLFIFNKKGLIHYGCLRSYLEKGQGSKYIALFNPRFPANPKAQPSKFTSDSKIKQVGIGSATGIIKAHLDLDGHVRSYEVFGTLPEGSIEWFKEESGYGRVEDDPHH

SEQ ID NO: 128 - protein, 1082 aa, Neisseria lactamica
  CRISPR-associated endonuclease
  ref <308>: DATABASE ACCESSION NUMBER: YP_004049328, NCBI Gene Database
  ref <309>: DATABASE ENTRY DATE: 2013-07-06
MAAFKPNPMNYILGLDIGIASVGWAMVEIDKEENPIRLIDLGVRVFERAEVPKTGDSLAMARRLARSVRRLTRRRAHRLLRARRLLKREGVLQDADFDENGLVKSLPNTPWQLRAAALDRKLTCLEWSAVLLHLIKHRGYLSQRKNEGETADKELGALLKGVADNAHALQTGDFRTPAELALNKFEKESGHIRNQRGDYSHTFSRKDLQAELNLLFEKQKEFSNPHVSDSLKEGIETLLMAQRPALSGDAVQKMLGHCTFEPAEPKAAKNTYTAERFIWLTKLNNLRILEQGSERPLTDTERATLMDEPYRKSKLTYAQARKLLGLEDTAFFKGLRYGKDNAEAPTLMEMKAYHAISRALEKEGLKDKKSPLNLSTELQDEIGTAFSLFKTDKDITGRLKDRVQPEILEALLKHISFDKFVQISLKALRRIVPLMEQGKRYDEACAEIYGDHYCKKNAEEKIYLPPIPADEIRNPVVLRALSQARKVINCVVRRYGSPARIHIETAREVGKSFKDRKEIEKRQEENRKDREKAAAKFREYFPNFVGEPKSKDILKLRLYEQQHGKCLYSGKEINLVRLNEKGYVEIDHALPFSRTWDDSFNNKVLVLGSENQNKGNQTPYEYFNGKDNSREWQEFKARVETSRFPRSKKQRILLQKFDEEGFKERNLNDTRYVNRFLCQFVADHILLTGKGKRRVFASNGQITNLLRGFWGLRKVRAENDRHHALDAVVVACSTVAMQQKITRFVRYKEMNAFDGKTIDKETGEVLHQKAHFPQPWEFFAQEVMIRVFGKPDGKPEFEEADTPEKLRTLLAEKLSSRPEAVHEYVTPLFVSRAPNRKMSGQGHMETVKSAKRLDEGISVLRVPLTQLKLKGLEKMVNREREPKLYDALKAQLETHKDNPAKAFAEPFYKYDKAGNRTQQVKAVRIEQVQKTGVWVRNHNGIADNATMVRVDVFEKGGKYYLVPIYSWQVAKGILPDRAVVAFKDEEDWTVMDDSFEFRFVLYANDLIKLTAKKNEFLGYFVSLNRATGAIDIRTHDTDSTKGKNGIFQSVGVKTALSFQKNQIDELGKEIRPCRLKKRPPVR

SEQ ID NO: 129 - protein, 1345 aa, Streptococcus mutans
  CRISPR-associated endonuclease
  ref <308>: DATABASE ACCESSION NUMBER: YP_003484612, NCBI Gene Database
  ref <309>: DATABASE ENTRY DATE: 2013-08-27
MKKPYSIGLDIGTNSVGWAVVTDDYKVPAKKMKVLGNTDKSHIKKNLLGALLFDSGNTAADRRLKRTARRRYTRRRNRILYLQEIFAEEMSKVDDSFFHRLEDSFLVTEDKRGERHPIFGNLEEEVKYHENFPTIYHLRQYLADNPEKVDLRLVYLALAHIIKFRGHFLIEGKFDTRNNDVQRLFQEFLAVYDNTFENSSLQEQNVQVEEILTDKISKSAKKDRVLKLFPNEKSNGRFAEFLKLIVGNQADFKKHFELEEKAPLQFSKDTYEEELEVLLAQIGDNYAELFLSAKKLYDSILLSGILTVTDVSTKAPLSASMIQRYNEHQMDLAQLKQFIRQKLSDKYNEVFSDVSKDGYAGYIDGKTNQEAFYKYLKGLLNKIEGSGYFLDKIEREDFLRKQRTFDNGSIPHQIHLQEMRAIIRRQAEFYPFLADNQDRIEKILTFRIPYYVGPLARGKSDFAWLSRKSADKITPWNFDEIVDKESSAEAFINRMTNYDLYLPNQKVLPKHSLLYEKFTVYNELTKVKYKTEQGKTAFFDANMKQEIFDGVFKVYRKVTKDKLMDFLEKEFDEFRIVDLTGLDKENKAFNASYGTYHDLRKILDKDFLDNSKNEKILEDIVLTLTLFEDREMIRKRLENYSDLLTKEQVKKLERRHYTGWGRLSAELIHGIRNKESRKTILDYLIDDGNSNRNFMQLINDDALSFKEEIAKAQVIGETDNLNQVVSDIAGSPAIKKGILQSLKIVDELVKIMGHQPENIVVEMARENQFTNQGRRNSQQRLKGLTDSIKEFGSQILKEHPVKHSQLQNDRLFLYYLQNGRDMYTGEELDIDYLSQYDIDHIIPQAFIKDNSIDNRVLTSSKENRGKSDDVPSKNVVRKMKSYWSKLLSAKLITQRKFDNLTKAERGGLTDDDKAGFIKRQLVETRQITKHVARILDERFHTETDENNKKIRQVKIVTLKSNLVSNFRKEFELYKVREINDYHHAHDAYLNAVIGKALLGVYPQLEPEFVYGDYPHFHGHKENKATAKKFFYSNIMNFFKKDDVRTDKNGEIIWKKDEHISNIKKVLSYPQVNIVKKVEEQTGGFSKESILPKGNSDKLIPRKTKKFYWDTKKYGGFDSPIVAYSILVIADIEKGKSKKLKTVKALVGVTIMEKMTFERDPVAFLERKGYRNVQEENIIKLPKYSLFKLENGRKRLLASARELQKGNEIVLPNHLGTLLYHAKNIHKVDEPKHLDYVDKHKDEFKELLDVVSNFSKKYTLAEGNLEKIKELYAQNNGEDLKELASSFINLLTFTAIGAPATFKFFDKNIDRKRYTSTTEILNATLIHQSITGLYETRIDLSKLGGD

SEQ ID NO: 130 - protein, 1371 aa, Streptococcus dysgalactiae
  CRISPR-associated endonuclease
  ref <308>: DATABASE ACCESSION NUMBER: YP_002996940, NCBI Gene Database
  ref <309>: DATABASE ENTRY DATE: 2013-06-27
MDKKYSIGLDIGTNSVGWAVITDDYKVPSKKFKVLGNTDRHSIKKNLIGALLFDSGETAEATRLKRTARRRYTRRKNRIRYLQEIFSSEMSKVDDSFFHRLEESFLVEEDKKHERHPIFGNIVDEVAYHEKYPTIYHLRKKLADSTDKADLRLIYLALAHMIKFRGHFLIEGDLNPDNSDMDKLFIQLVQTYNQLFEENPINASRVDAKAILSARLSKSRRLENLIAQLPGEKRNGLFGNLIALSLGLTPNFKSNFDLAEDAKLQLSKDTYDDDLDNLLAQIGDQYADLFLAAKNLSDAILLSDILRVNSEITKAPLSASMIKRYDEHHQDLTLLKALVRQQLPEKYKEIFFDQSKNGYAGYIDGGASQEEFYKFIKPILEKMDGTEELLAKLNREDLLRKQRTFDNGSIPHQIHLGELHAILRRQEDFYPFLKDNREKIEKILTFRIPYYVGPLARGNSRFAWMTRKSEETITPWNFEEVVDKGASAQSFIERMTNFDKNLPNEKVLPKHSLLYEYFTVYNELTKVKYVTEGMRKPEFLSGKQKEAIVDLLFKTNRKVTVKQLKEDYFKKIECFDSVEISGVEDRFNASLGTYHDLLKIIKDKDFLDNEENEDILEDIVLTLTLFEDKEMIEERLKKYANLFDDKVMKQLKRRHYTGWGRLSRKLINGIRDKQSGKTILDFLKSDGFANRNFMQLINDDSLTFKEAIQKAQVSGQGHSLHEQIANLAGSPAIKKGILQSVKVVDELVKVMGHKPENIVIEMARENQTTQKGQKNSRERMKRIEEGIKELGSQILKEHPVENTQLQNEKLYLYYLQNGRDMYVDQELDINRLSDYDVDHIVPQSFIKDDSIDNKILTRSDKNRGKSDNVPSEEVVKKMKNYWRQLLNAKLITQRKFDNLTKAERGGLSELDKAGFIKRQLVETRQITKHVAQILDSRMNTKYDENDKLIREVKVITLKSKLVSDFRKDFQFYKVREINNYHHAHDAYLNAVVGTALIKKYTKLESEFVYGDYKVYDVRKMIAKSEQEIGKATAKRFFYSNIMNFFKTEITLANGEIRKRPLIETNEETGEIVWDKGRDFATVRKVLSMPQVNIVKKTEVQTGALTNESIYARGSFDKLISRKHRFESSKYGGFGSPTVTYSVLVVAKSKVQDGKVKKIKTGKELIGMTLLDKLVFEKNPLKFIEDKGYGNVQIDKCIKLPKYSLFEFENGTRRMLASVMANNNSRGDLQKANEMFLPAKLVTLLYHAHKIESSKELEHEAYILDHYNDLYQLLSYIERFASLYVDVEKNISKVKELFSNIESYSISEICSSVINLLTLTASGAPADFKFLGTTIPRKRYGSPQSILSSTLIHQSITGLYETRIDLSQLGGD

SEQ ID NO: 131 - protein, 1082 aa, Neisseria meningitidis
  CRISPR-associated endonuclease
  ref <308>: DATABASE ACCESSION NUMBER: YP_001598557, NCBI Gene Database
  ref <309>: DATABASE ENTRY DATE: 2013-06-10
MAAFKPNPINYILGLDIGIASVGWAMVEIDEDENPICLIDLGVRVFERAEVPKTGDSLAMARRLARSVRRLTRRRAHRLLRARRLLKREGVLQAADFDENGLIKSLPNTPWQLRAAALDRKLTPLEWSAVLLHLIKHRGYLSQRKNEGETADKELGALLKGVADNAHALQTGDFRTPAELALNKFEKESGHIRNQRGDYSHTFSRKDLQAELNLLFEKQKEFGNPHISDGLKEGIETLLMTQRPALSGDAVQKMLGHCTFEPAEPKAAKNTYTAERFIWLTKLNNLRILEQGSERPLTDTERTTLIDEPYRKSKLTYAQARKLLELDNTAFFKGLRYGKDNAEASTLMEMKAYHAISRALEKEGLKDKKSPLNLSPELQDEIGTAFSLFKTDEDITGRLKDRVQPEILEALLKHISFDKFVQISLKALRRIVPLMEQGKRYDEACAEIYGDHYGKKNTEEKIDLPPIPADEIRNPVVLRALSQARKVINGVVRRYGSPARIHIETAREVGKSFKDRKEIEKRQEENRKDREKAATKFREYFPNFVGEPKSKDILKLRLYEQQHGKCLYSGKEINLGRLNEKGYVEIDHALPFSRTWDDSFNNKVLVLGSENQNKGNQTPYEYFNGKDNSREWQEFKARVETSRFPRSKKQRILLQKFDEEGFKERNLNDTRYVNRFLCQFVADHMLLTGKGKRRVFASNGQITNLLRGFWGLRKVRAENDRHHALDAVVVACSTVAMQQKITRFVRYKEMNAFDGKTIDKETGEVLHQKTHFPQPWEFFAQEVMIRVFGKPDGKPEFEEADTPEKLRTLLAEKLSSRPEAVHEYVTPLFVSRAPNRKMSGQGHMETVKSAKRLDEGVSVLRVPLTQLKLKDLEKMVNREREPKLYEALKARLEAHKDDPAKAFAEPFYKYDKAGNRTQQVKAVRVEQVQKTGVWVRNHNGIADNATMVRVDVFEKGDKYYLVPIYSWQVAKGILPDRAVVQGKDEEDWQLIDDSFNFKFSLHPNDLVEVITKKARMFGYFASCHRGTGNINIRIHDLDHKIGKNGILEGIGVKTALSFQKYQIDELGKEIRPCRLKKRPPVR

SEQ ID NO: 132 - protein, 1370 aa, Streptococcus agalactiae
  CRISPR-associated endonuclease
  ref <308>: DATABASE ACCESSION NUMBER: YP_329639, NCBI Gene Database
  ref <309>: DATABASE ENTRY DATE: 2013-06-10
MNKPYSIGLDIGTNSVGWSIITDDYKVPAKKMRVLGNTDKEYIKKNLIGALLFDGGNTAADRRLKRTARRRYTRRRNRILYLQEIFAEEMSKVDDSFFHRLEDSFLVEEDKRGSKYPIFATLQEEKDYHEKFSTIYHLRKELADKKEKADLRLIYIALAHIIKFRGHFLIEDDSFDVRNTDISKQYQDFLEIFNTTFENNDLLSQNVDVEAILTDKISKSAKKDRILAQYPNQKSTGIFAEFLKLIVGNQADFKKYFNLEDKTPLQFAKDSYDEDLENLLGQIGDEFADLFSAAKKLYDSVLLSGILTVIDLSTKAPLSASMIQRYDEHREDLKQLKQFVKASLPEKYQEIFADSSKDGYAGYIEGKTNQEAFYKYLSKLLTKQEDSENFLEKIKNEDFLRKQRTFDNGSIPHQVHLTELKAIIRRQSEYYPFLKENQDRIEKILTFRIPYYIGPLAREKSDFAWMTRKTDDSIRPWNFEDLVDKEKSAEAFIHRMTNNDFYLPEEKVLPKHSLIYEKFTVYNELTKVRYKNEQGETYFFDSNIKQEIFDGVFKEHRKVSKKKLLDFLAKEYEEFRIVDVIGLDKENKAFNASLGTYHDLEKILDKDFLDNPDNESILEDIVQTLTLFEDREMIKKRLENYKDLFTESQLKKLYRRHYTGWGRLSAKLINGIRDKESQKTILDYLIDDGRSNRNFMQLINDDGLSFKSIISKAQAGSHSDNLKEVVGELAGSPAIKKGILQSLKIVDELVKVMGYEPEQIVVEMARENQTTNQGRRNSRQRYKLLDDGVKNLASDLNGNILKEYPTDNQALQNERLFLYYLQNGRDMYTGEALDIDNLSQYDIDHIIPQAFIKDDSIDNRVLVSSAKNRGKSDDVPSLEIVKDCKVFWKKLLDAKLMSQRKYDNLTKAERGGLTSDDKARFIQRQLVETRQITKHVARILDERFNNELDSKGRRIRKVKIVTLKSNLVSNFRKEFGFYKIREVNNYHHAHDAYLNAVVAKAILTKYPQLEPEFVYGDYPKYNSYKTRKSATEKLFFYSNIMNFFKTKVTLADGTVVVKDDIEVNNDTGEIVWDKKKHFATVRKVLSYPQNNIVKKTEIQTGGFSKESILAHGNSDKLIPRKTKDIYLDPKKYGGFDSPIVAYSVLVVADIKKGKAQKLKTVTELLGITIMERSRFEKNPSAFLESKGYLNIRADKLIILPKYSLFELENGRRRLLASAGELQKGNELALPTQFMKFLYLASRYNESKGKPEEIEKKQEFVNQHVSYFDDILQLINDFSKRVILADANLEKINKLYQDNKENISVDELANNIINLFTFTSLGAPAAFKFFDKIVDRKRYTSTKEVLNSTLIHQSITGLYETRIDLGKLGED

SEQ ID NO: 133 - protein, 1368 aa, Streptococcus pyogenes
  CRISPR-associated endonuclease
  ref <308>: DATABASE ACCESSION NUMBER: YP_282132, NCBI Gene Database
  ref <309>: DATABASE ENTRY DATE: 2013-08-28
MDKKYSIGLDIGTNSVGWAVITDDYKVPSKKFKVLGNTDRHSIKKNLIGALLFDSGETAEATRLKRTARRRYTRRKNRICYLQEIFSNEMAKVDDSFFHRLEESFLVEEDKKHERHPIFGNIVDEVAYHEKYPTIYHLRKKLVDSTDKADLRLIYLALAHMIKFRGHFLIEGDLNPDNSDVDKLFIQLVQTYNQLFEENPINASGVDAKAILSARLSKSRRLENLIAQLPGEKKNGLFGNLIALSLGLTPNFKSNFDLAEDAKLQLSKDTYDDDLDNLLAQIGDQYADLFLAAKNLSDAILLSDILRVNTEITKAPLSASMIKRYDEHHQDLTLLKALVRQQLPEKYKEIFFDQSKNGYAGYIDGGASQEEFYKFIKPILEKMDGTEELLVKLNREDLLRKQRTFDNGSIPHQIHLGELHAILRRQEDFYPFLKDNREKIEKILTFRIPYYVGPLARGNSRFAWMTRKSEETITPWNFEEVVDKGASAQSFIERMTNFDKNLPNEKVLPKHSLLYEYFTVYNELTKVKYVTEGMRKPAFLSGEQKKAIVDLLFKTNRKVTVKQLKEDYFKKIECFDSVEISGVEDRFNASLGTYHDLLKIIKDKDFLDNEENEDILEDIVLTLTLFEDREMIEERLKTYAHLFDDKVMKQLKRRRYTGWGRLSRKLINGIRDKQSGKTILDFLKSDGFANRNFMQLIHDDSLTFKEDIQKAQVSGQGDSLHEHIANLAGSPAIKKGILQTVKVVDELVKVMGRHKPENIVIEMARENQTTQKGQKNSRERMKRIEEGIKELGSQILKEHPVENTQLQNEKLYLYYLQNGRDMYVDQELDINRLSDYDVDHIVPQSFLKDDSIDNKVLTRSDKNRGKSDNVPSEEVVKKMKNYWRQLLNAKLITQRKFDNLTKAERGGLSELDKAGFIKRQLVETRQITKHVAQILDSRMNTKYDENDKLIREVKVITLKSKLVSDFRKDFQFYKVREINNYHHAHDAYLNAVVGTALIKKYPKLESEFVYGDYKVYDVRKMIAKSEQEIGKATAKYFFYSNIMNFFKTEITLANGEIRKRPLIETNGETGEIVWDKGRDFATVRKVLSMPQVNIVKKTEVQTGGFSKESILPKRNSDKLIARKKDWDPKKYGGFDSPTVAYSVLVVAKVEKGKSKKLKSVKELLGITIMERSSFEKNPIDFLEAKGYKEVKKDLIIKLPKYSLFELENGRKRMLASAGELQKGNELALPSKYVNFLYLASHYEKLKGSPEDNEQKQLFVEQHKHYLDEIIEQISEFSKRVILADANLDKVLSAYNKHRDKPIREQAENIIHLFTLTNLGAPAAFKYFDTTIDRKRYTSTKEVLDATLIHQSITGLYETRIDLSQLGGD

SEQ ID NO: 134 - protein, 1314 aa, Mycoplasma synoviae
  CRISPR-associated endonuclease
  ref <308>: DATABASE ACCESSION NUMBER: YP_278700, NCBI Gene Database
  ref <309>: DATABASE ENTRY DATE: 2013-06-10
MLRLYCANNLVLNNVQNLWKYLLLLIFDKKIIFLFKIKVILIRRYMENNNKEKIVIGFDLGVASVGWSIVNAETKEVIDLGVRLFSEPEKADYRRAKRTTRRLLRRKKFKREKFHKLILKNAEIFGLQSRNEILNVYKDQSSKYRNILKLKINALKEEIKPSELVWILRDYLQNRGYFYKNEKLTDEFVSNSFPSKKLHEHYEKYGFFRGSVKLDNKLDNKKDKAKEKDEEEESDAKKESEELIFSNKQWINEIVKVFENQSYLTESFKEEYLKLFNYVRPFNKGPGSKNSRTAYGVFSTDIDPETNKFKDYSNIWDKTIGKCSLFEEEIRAPKNLPSALIFNLQNEICTIKNEFTEFKNWWLNAEQKSEILKFVFTELFNWKDKKYSDKKFNKNLQDKIKKYLLNFALENFNLNEEILKNRDLENDTVLGLKGVKYYEKSNATADAALEFSSLKPLYVFIKFLKEKKLDLNYLLGLENTEILYFLDSIYLAISYSSDLKERNEWFKKLLKELYPKIKNNNLEIIENVEDIFEITDQEKFESFSKTHSLSREAFNHIIPLLLSNNEGKNYESLKHSNEELKKRTEKAELKAQQNQKYLKDNFLKEALVPLSVKTSVLQAIKIFNQIIKNFGKKYEISQVVIEMARELTKPNLEKLLNNATNSNIKILKEKLDQTEKFDDFTKKKFIDKIENSVVFRNKLFLWFEQDRKDPYTQLDIKINEIEDETEIDHVIPYSKSADDSWFNKLLVKKSTNQLKKNKTVWEYYQNESDPEAKWNKFVAWAKRIYLVQKSDKESKDNSEKNSIFKNKKPNLKFKNITKKLFDPYKDLGFLARNLNDTRYATKVFRDQLNNYSKHHSKDDENKLFKVVCMNGSITSFLRKSMWRKNEEQVYRFNFWKKDRDQFFHHAVDASIIAIFSLLTKTLYNKLRVYESYDVQRREDGVYLINKETGEVKKADKDYWKDQHNFLKIRENAIEIKNVLNNVDFQNQVRYSRKANTKLNTQLFNETLYGVKEFENNFYKLEKVNLFSRKDLRKFILEDLNEESEKNKKNENGSRKRILTEKYIVDEILQILENEEFKDSKSDINALNKYMDSLPSKFSEFFSQDFINKCKKENSLILTFDAIKHNDPKKVIKIKNLKFFREDATLKNKQAVHKDSKNQIKSFYESYKCVGFIWLKNKNDLEESIFVPINSRVIHFGDKDKDIFDFDSYNKEKLLNEINLKRPENKKFNSINEIEFVKFVKPGALLLNFENQQIYYISTLESSSLRAKIKLLNKMDKGKAVSMKKITNPDEYKIIEHVNPLGINLNWTKKLENNN

SEQ ID NO: 135 - protein, 1084 aa, Corynebacterium diphtheriae
  CRISPR-associated endonuclease
  ref <308>: DATABASE ACCESSION NUMBER: NP_938445, NCBI Gene Database
  ref <309>: DATABASE ENTRY DATE: 2013-06-10
MKYHVGIDVGTFSVGLAAIEVDDAGMPIKTLSLVSHIHDSGLDPDEIKSAVTRLASSGIARRTRRLYRRKRRRLQQLDKFIQRQGWPVIELEDYSDPLYPWKVRAELAASYIADEKERGEKLSVALRHIARHRGWRNPYAKVSSLYLPDGPSDAFKAIREEIKRASGQPVPETATVGQMVTLCELGTLKLRGEGGVLSARLQQSDYAREIQEICRMQEIGQELYRKIIDVVFAAESPKGSASSRVGKDPLQPGKNRALKASDAFQRYRIAALIGNLRVRVDGEKRILSVEEKNLVFDHLVNLTPKKEPEWVTIAEILGIDRGQLIGTATMTDDGERAGARPPTHDTNRSIVNSRIAPLVDWWKTASALEQHAMVKALSNAEVDDFDSPEGAKVQAFFADLDDDVHAKLDSLHLPVGRAAYSEDTLVRLTRRMLSDGVDLYTARLQEFGIEPSWTPPTPRIGEPVGNPAVDRVLKTVSRWLESATKTWGAPERVIIEHVREGFVTEKRAREMDGDMRRRAARNAKLFQEMQEKLNVQGKPSRADLWRYQSVQRQNCQCAYCGSPITFSNSEMDHIVPRAGQGSTNTRENLVAVCHRCNQSKGNTPFAIWAKNTSIEGVSVKEAVERTRHWVTDTGMRSTDFKKFTKAVVERFQRATMDEEIDARSMESVAWMANELRSRVAQHFASHGTTVRVYRGSLTAEARRASGISGKLKFFDGVGKSRLDRRHHAIDAAVIAFTSDYVAETLAVRSNLKQSQAHRQEAPQWREFTGKDAEHRAAWRVWCQKMEKLSALLTEDLRDDRVVVMSNVRLRLGNGSAHKETIGKLSKVKLSSQLSVSDIDKASSEALWCALTREPGFDPKEGLPANPERHIRVNGTHVYAGDNIGLFPVSAGSIALRGGYAELGSSFHHARVYKITSGKKPAFAMLRVYTIDLLPYRNQDLFSVELKPQTMSMRQAEKKLRDALATGNAEYLGWLVVDDELVVDTSKIATDQVKAVEAELGTIRRWRVDGFFSPSKLRLRPLQMSKEGIKKESAPELSKIIDRPGWLPAVNKLFSDGNVTVVRRDSLGRVRLESTAHLPVTWKVQ

SEQ ID NO: 136 - protein, 1409 aa, Wolinella succinogenes
  CRISPR-associated endonuclease
  ref <308>: DATABASE ACCESSION NUMBER: NP_907747, NCBI Gene Database
  ref <309>: DATABASE ENTRY DATE: 2013-05-23
MLVSPISVDLGGKNTGFFSFTDSLDNSQSGTVIYDESFVLSQVGRRSKRHSKRNNLRNKLVKRLFLLILQEHHGLSIDVLPDEIRGLFNKRGYTYAGFELDEKKKDALESDTLKEFLSEKLQSIDRDSDVEDFLNQIASNAESFKDYKKGFEAVFASATHSPNKKLELKDELKSEYGENAKELLAGLRVTKEILDEFDKQENQGNLPRAKYFEELGEYIATNEKVKSFFDSNSLKLTDMTKLIGNISNYQLKELRRYFNDKEMEKGDIWIPNKLHKITERFVRSWHPKNDADRQRRAELMKDLKSKEIMELLTTTEPVMTIPPYDDMNNRGAVKCQTLRLNEEYLDKHLPNWRDIAKRLNHGKFNDDLADSTVKGYSEDSTLLHRLLDTSKEIDIYELRGKKPNELLVKTLGQSDANRLYGFAQNYYELIRQKVRAGIWVPVKNKDDSLNLEDNSNMLKRCNHNPPHKKNQIHNLVAGILGVKLDEAKFAEFEKELWSAKVGNKKLSAYCKNIEELRKTHGNTFKIDIEELRKKDPAELSKEEKAKLRLTDDVILNEWSQKIANFFDIDDKHRQRFNNLFSMAQLHTVIDTPRSGFSSTCKRCTAENRFRSETAFYNDETGEFHKKATATCQRLPADTQRPFSGKIERYIDKLGYELAKIKAKELEGMEAKEIKVPIILEQNAFEYEESLRKSKTGSNDRVINSKKDRDGKKLAKAKENAEDRLKDKDKRIKAFSSGICPYCGDTIGDDGEIDHILPRSHTLKIYGTVFNPEGNLIYVHQKCNQAKADSIYKLSDIKAGVSAQWIEEQVANIKGYKTFSVLSAEQQKAFRYALFLQNDNEAYKKVVDWLRTDQSARVNGTQKYLAKKIQEKLTKMLPNKHLSFEFILADATEVSELRRQYARQNPLLAKAEKQAPSSHAIDAVMAFVARYQKVFKDGTPPNADEVAKLAMLDSWNPASNEPLTKGLSTNQKIEKMIKSGDYGQKNMREVFGKSIFGENAIGERYKPIVVQEGGYYIGYPATVKKGYELKNCKVVTSKNDIAKLEKIIKNQDLISLKENQYIKIFSINKQTISELSNRYFNMNYKNLVERDKEIVGLLEFIVENCRYYTKKVDVKFAPKYIHETKYPFYDDWRRFDEAWRYLQENQNKTSSKDRFVIDKSSLNEYYQPDKNEYKLDVDTQPIWDDFCRWYFLDRYKTANDKKSIRIKARKTFSLLAESGVQGKVFRAKRKIPTGYAYQALPMDNNVIAGDYANILLEANSKTLSLVPKSGISIEKQLDKKLDVIKKTDVRGLAIDNNSFFNADFDTHGIRLIVENTSVKVGNFPISAIDKSAKRMIFRALFEKEKGKRKKKTTISFKESGPVQDYLKVFLKKIVKIQLRTDGSISNIVVRKNAADFTLSFRSEHIQKLLK

SEQ ID NO: 137 - protein, 1056 aa, Pasteurella multocida
  CRISPR-associated endonuclease
  ref <308>: DATABASE ACCESSION NUMBER: NP_246064, NCBI Gene Database
  ref <309>: DATABASE ENTRY DATE: 2013-06-27
MQTTNLSYILGLDLGIASVGWAVVEINENEDPIGLIDVGVRIFERAEVPKTGESLALSRRLARSTRRLIRRRAHRLLLAKRFLKREGILSTIDLEKGLPNQAWELRVAGLERRLSAIEWGAVLLHLIKHRGYLSKRKNESQTNNKELGALLSGVAQNHQLLQSDDYRTPAELALKKFAKEEGHIRNQRGAYTHTFNRLDLLAELNLLFAQQHQFGNPHCKEHIQQYMTELLMWQKPALSGEAILKMLGKCTHEKNEFKAAKHTYSAERFVWLTKLNNLRILEDGAERALNEEERQLLINHPYEKSKLTYAQVRKLLGLSEQAIFKHLRYSKENAESATFMELKAWHAIRKALENQGLKDTWQDLAKKPDLLDEIGTAFSLYKTDEDIQQYLTNKVPNSVINALLVSLNFDKFIELSLKSLRKILPLMEQGKRYDQACREIYGHHYGEANQKTSQLLPAIPAQEIRNPVVLRTLSQARKVINAIIRQYGSPARVHIETGRELGKSFKERREIQKQQEDNRTKRESAVQKFKELFSDFSSEPKSKDILKFRLYEQQHGKCLYSGKEINIHRLNEKGYVEIDHALPFSRTWDDSFNNKVLVLASENQNKGNQTPYEWLQGKINSERWKNFVALVLGSQCSAAKKQRLLTQVIDDNKFIDRNLNDTRYIARFLSNYIQENLLLVGKNKKNVFTPNGQITALLRSRWGLIKARENNNRHHALDAIVVACATPSMQQKITRFIRFKEVHPYKIENRYEMVDQESGEIISPHFPEPWAYFRQEVNIRVFDNHPDTVLKEMLPDRPQANHQFVQPLFVSRAPTRKMSGQGHMETIKSAKRLAEGISVLRIPLTQLKPNLLENMVNKEREPALYAGLKARLAEFNQDPAKAFATPFYKQGGQQVKAIRVEQVQKSGVLVRENNGVADNASIVRTDVFIKNNKFFLVPIYTWQVAKGILPNKAIVAHKNEDEWEEMDEGAKFKFSLFPNDLVELKTKKEYFFGYYIGLDRATGNISLKEHDGEISKGKDGVYRVGVKLALSFEKYQVDELGKNRQICRPQQRQPVR

SEQ ID NO: 138 - protein, 1368 aa, Streptococcus pyogenes
  CRISPR-associated endonuclease
  ref <308>: DATABASE ACCESSION NUMBER: NP_802438, NCBI Gene Database
  ref <309>: DATABASE ENTRY DATE: 2013-06-10
MDKKYSIGLDIGTNSVGWAVITDDYKVPSKKLKGLGNTDRHGIKKNLIGALLFDSGETAEATRLKRTARRRYTRRKNRICYLQEIFSNEMAKVDDSFFHRLEESFLVEEDKKHERHPIFGNIVDEVAYHEKYPTIYHLRKKLADSTDKVDLRLIYLALAHMIKFRGHFLIEGDLNPDNSDVDKLFIQLVQTYNQLFEENPINASRVDAKAILSARLSKSRRLENLIAQLPGEKKNGLFGNLIALSLGLTPNFKSNFDLAEDAKLQLSKDTYDDDLDNLLAQIGDQYADLFLAAKNLSDATLLSDILRVNSEITKAPLSASMIKRYDEHHQDLTLLKALVRQQLPEKYKEIFFDQSKNGYAGYIDGGASQEEFYKFIKPILEKMDGTEELLAKLNREDLLRKQRTFDNGSIPYQIHLGELHAILRRQEDFYPFLKDNREKIEKILTFRIPYYVGPLARGNSRFAWMTRKSEETITPWNFEEVVDKGASAQSFIERMTNFDKNLPNEKVLPKHSLLYEYFTVYNELTKVKYVTEGMRKPAFLSGEQKKAIVDLLFKTNRKVTVKQLKEDYFKKIECFDSVEISGVEDRFNASLGTYHDLLKIIKDKDFLDNEENEDILEDIVLTLTLFEDREMIEERLKTYAHLFDDKVMKQLKRRRYTGWGRLSRKLINGIRDKQSGKTILDFLKSDGFANRNFMQLIHDDSLTFKEDIQKAQVSGQGDSLHEHIANLAGSPAIKKGILQTVKVVDELVKVMGRHKPENIVIEMARENQTTQKGQKNSRERMKRIEEGIKELGSDILKEYPVENTQLQNEKLYLYYLQNGRDMYVDQELDINRLSDYDVDHIVPQSFLKDDSIDNKVLTRSDKNRGKSDNVPSEEVVKKMKNYWRQLLNAKLITQRKFDNLTKAERGGLSELDKVGFIKRQLVETRQITKHVAQILDSRMNTKYDENDKLIREVRVITLKSKLVSDFRKDFQFYKVREINNYHHAHDAYLNAVVGTALIKKYPKLESEFVYGDYKVYDVRKMIAKSEQEIGKATAKYFFYSNIMNFFKTEITLANGEIRKRPLIETNGETGEIVWDKGRDFATVRKVLSMPQVNIVKKTEVQTGGFSKESILPKRNSDKLIARKKDWDPKKYGGFDSPTVAYSVLVVAKVEKGKSKKLKSVKELLGITIMERSSFEKDPIDFLEAKGYKEVRKDLIIKLPKYSLFELENGRKRMLASAGELQKGNELALPSKYVNFLYLASHYEKLKGSPEDNEQKQLFVEQHKHYLDEIIEQISEFSKRVILADANLDKVLSAYNKHRDKPIREQAENIIHLFTLTNLGAPAAFKYFDTTIDRKRYTSTKEVLDATLIHQSITGLYETRIDLSQLGGD

SEQ ID NO: 139 - protein, 1345 aa, Streptococcus mutans
  CRISPR-associated endonuclease
  ref <308>: DATABASE ACCESSION NUMBER: NP_721764, NCBI Gene Database
  ref <309>: DATABASE ENTRY DATE: 2013-06-27
MKKPYSIGLDIGTNSVGWAVVTDDYKVPAKKMKVLGNTDKSHIEKNLLGALLFDSGNTAEDRRLKRTARRRYTRRRNRILYLQEIFSEEMGKVDDSFFHRLEDSFLVTEDKRGERHPIFGNLEEEVKYHENFPTIYHLRQYLADNPEKVDLRLVYLALAHIIKFRGHFLIEGKFDTRNNDVQRLFQEFLAVYDNTFENSSLQEQNVQVEEILTDKISKSAKKDRVLKLFPNEKSNGRFAEFLKLIVGNQADFKKHFELEEKAPLQFSKDTYEEELEVLLAQIGDNYAELFLSAKKLYDSILLSGILTVTDVGTKAPLSASMIQRYNEHQMDLAQLKQFIRQKLSDKYNEVFSDVSKDGYAGYIDGKTNQEAFYKYLKGLLNKIEGSGYFLDKIEREDFLRKQRTFDNGSIPHQIHLQEMRAIIRRQAEFYPFLADNQDRIEKLLTFRIPYYVGPLARGKSDFAWLSRKSADKITPWNFDEIVDKESSAEAFINRMTNYDLYLPNQKVLPKHSLLYEKFTVYNELTKVKYKTEQGKTAFFDANMKQEIFDGVFKVYRKVTKDKLMDFLEKEFDEFRIVDLTGLDKENKVFNASYGTYHDLCKILDKDFLDNSKNEKILEDIVLTLTLFEDREMIRKRLENYSDLLTKEQVKKLERRHYTGWGRLSAELIHGIRNKESRKTILDYLIDDGNSNRNFMQLINDDALSFKEEIAKAQVIGETDNLNQVVSDIAGSPAIKKGILQSLKIVDELVKIMGHQPENIVVEMARENQFTNQGRRNSQQRLKGLTDSIKEFGSQILKEHPVENSQLQNDRLFLYYLQNGRDMYTGEELDIDYLSQYDIDHIIPQAFIKDNSIDNRVLTSSKENRGKSDDVPSKDVVRKMKSYWSKLLSAKLITQRKFDNLTKAERGGLTDDDKAGFIKRQLVETRQITKHVARILDERFNTETDENNKKIRQVKIVTLKSNLVSNFRKEFELYKVREINDYHHAHDAYLNAVIGKALLGVYPQLEPEFVYGDYPHFHGHKENKATAKKFFYSNIMNFFKKDDVRTDKNGEIIWKKDEHISNIKKVLSYPQVNIVKKVEEQTGGFSKESILPKGNSDKLIPRKTKKFYWDTKKYGGFDSPIVAYSILVIADIEKGKSKKLKTVKALVGVTIMEKMTFERDPVAFLERKGYRNVQEENIIKLPKYSLFKLENGRKRLLASARELQKGNEIVLPNHLGTLLYHAKNIHKVDEPKHLDYVDKHKDEFKELLDVVSNFSKKYTLAEGNLEKIKELYAQNNGEDLKELASSFINLLTFTAIGAPATFKFFDKNIDRKRYTSTTEILNATLIHQSITGLYETRIDLNKLGGD

SEQ ID NO: 140 - protein, 1334 aa, Listeria innocua
  CRISPR-associated endonuclease
  ref <308>: DATABASE ACCESSION NUMBER: NP_472073, NCBI Gene Database
  ref <309>: DATABASE ENTRY DATE: 2013-06-27
MKKPYTIGLDIGTNSVGWAVLTDQYDLVKRKMKIAGDSEKKQIKKNFWGVRLFDEGQTAADRRMARTARRRIERRRNRISYLQGIFAEEMSKTDANFFCRLSDSFYVDNEKRNSRHPFFATIEEEVEYHKNYPTIYHLREELVNSSEKADLRLVYLALAHIIKYRGNFLIEGALDTQNTSVDGIYKQFIQTYNQVFASGIEDGSLKKLEDNKDVAKILVEKVTRKEKLERILKLYPGEKSAGMFAQFISLIVGSKGNFQKPFDLIEKSDIECAKDSYEEDLESLLALIGDEYAELFVAAKNAYSAVVLSSIITVAETETNAKLSASMIERFDTHEEDLGELKAFIKLHLPKHYEEIFSNTEKHGYAGYIDGKTKQADFYKYMKMTLENIEGADYFIAKIEKENFLRKQRTFDNGAIPHQLHLEELEAILHQQAKYYPFLKENYDKIKSLVTFRIPYFVGPLANGQSEFAWLTRKADGEIRPWNIEEKVDFGKSAVDFIEKMTNKDTYLPKENVLPKHSLCYQKYLVYNELTKVRYINDQGKTSYFSGQEKEQIFNDLFKQKRKVKKKDLELFLRNMSHVESPTIEGLEDSFNSSYSTYHDLLKVGIKQEILDNPVNTEMLENIVKILTVFEDKRMIKEQLQQFSDVLDGVVLKKLERRHYTGWGRLSAKLLMGIRDKQSHLTILDYLMNDDGLNRNLMQLINDSNLSFKSIIEKEQVTTADKDIQSIVADLAGSPAIKKGILQSLKIVDELVSVMGYPPQTIVVEMARENQTTGKGKNNSRPRYKSLEKAIKEFGSQILKEHPTDNQELRNNRLYLYYLQNGKDMYTGQDLDIHNLSNYDIDHIVPQSFITDNSIDNLVLTSSAGNREKGDDVPPLEIVRKRKVFWEKLYQGNLMSKRKFDYLTKAERGGLTEADKARFIHRQLVETRQITKNVANILHQRFNYEKDDHGNTMKQVRIVTLKSALVSQFRKQFQLYKVRDVNDYHHAHDAYLNGVVANTLLKVYPQLEPEFVYGDYHQFDWFKANKATAKKQFYTNIMLFFAQKDRIIDENGEILWDKKYLDTVKKVMSYRQMNIVKKTEIQKGEFSKATIKPKGNSSKLIPRKTNWDPMKYGGLDSPNMAYAVVIEYAKGKNKLVFEKKIIRVTIMERKAFEKDEKAFLEEQGYRQPKVLAKLPKYTLYECEEGRRRMLASANEAQKGNQQVLPNHLVTLLHHAANCEVSDGKSLDYIESNREMFAELLAHVSEFAKRYTLAEANLNKINQLFEQNKEGDIKAIAQSFVDLMAFNAMGAPASFKFFETTIERKRYNNLKELLNSTIIYQSITGLYESRKRLDD

SEQ ID NO: 141 - protein, 1371 aa, Streptococcus gallolyticus; identical to SEQ ID NO: 72
  CRISPR-associated endonuclease
  ref <308>: DATABASE ACCESSION NUMBER: YP_006034260, NCBI Gene Database
  ref <309>: DATABASE ENTRY DATE: 2013-06-11

SEQ ID NO: 142 - protein, 1130 aa, Streptococcus gallolyticus; identical to SEQ ID NO: 71
  CRISPR-associated endonuclease
  ref <308>: DATABASE ACCESSION NUMBER: YP_006034250, NCBI Gene Database
  ref <309>: DATABASE ENTRY DATE: 2013-06-11

SEQ ID NO: 143 - protein, 897 aa, Corynebacterium ulcerans
  CRISPR-associated endonuclease
  ref <308>: DATABASE ACCESSION NUMBER: YP_005709668, NCBI Gene Database
  ref <309>: DATABASE ENTRY DATE: 2013-06-11
MTNAGTNHHVLWAKFDNVSEPYPLLAHLLDTATAATCLFNHWLRKGLRDRLSTELGPDAEKILGFVAGIHDLGKANPYFQAQRRNKKEEWITLRDAIQKAGFPLGNGTSALFEETKEKRRHENITLSILGWEITKFLQVKDVWPQLAIIGHHGNFSAPGFLSDKDDLEDIEDIFDDNGWSPTHELLVSSLLQAVGLEKQPEIKHISPASAILISGLVVLADRIASQSEMASDGLQALQKEELFFHQPEKWIANRKAFCREIIETTVGTYHPWESEAAGIRAVLGDYEPRFTQKAALNAGDGLFNVMETTGAGKTEAALLRHVKRKERLLFFLPTQATTNAIMDRIGKIFDGTPNVASLAHGLAVTEDFYAHPILPVQGSSDDANYKDNGGLYPTEFVRSAGTPRLLAPVCVGTIDQALMGALPSKFNHLRLLALANAHVVVDEVHTMDQYQSELMSGLLEWWSATDTPVTLLTATMPAWQREKFHLSYTGKEPHFKGVFPSLEDWSTPNKNTETSQENIPTEAFTIPIRIDKIAHNEIVDSHVQWVIEQRKLFPQARIGIICNTVGRAQSIAEALAHESPIVLHSRMTAGHRKEAATKLEQAIGKKGTATATLVIGTQAIEASLDIDLDLLRTELCPAPSLIQRAGRLWRRLDPQREVRVPGMVGKKLTIAVVDSPSTGQTLPYLRSQLYRVESWLKQRDRIEFPADIQDFIDATTPGLQELFQKVSLPEDCGSAEEREALADDYLNEVASWVTKQRQAGTSRIDFAKHGKPRQVLASDCVVEDFLQITSAKDLEERATRLIDYPTISAILCDPTGTIPGAWTDSVEKLIAIPAKDRESLRRALSASISIPHSKKFLPITSREIPLSEAKTLLSGYSAVHIQPEEYDLQSGLKGPQK

SEQ ID NO: 144 - protein, 1050 aa, Gluconacetobacter diazotrophicus
  CRISPR-associated endonuclease
  ref <308>: DATABASE ACCESSION NUMBER: YP_001602368, NCBI Gene Database
  ref <309>: DATABASE ENTRY DATE: 2013-08-27
MGENMIDESLTFGIDLGIGSCGWAVLRRPSAFGRKGVIEGMGSWCFDVPETSKERTPTNQIRRSNRLLRRVIRRRRNRMAAIRRLLHAAGLLPSTDSDALKRPGHDPWELRARGLDKPLKPVEFAVVLGHIAKRRGFKSAAKRKATNISSDDKKMLTALEATRERLGRYRTVGEMFARDPDFASRRRNREGKYDRTTARDDLEHEVHALFAAQRRLGQGFASPELEEAFTASAFHQRPMQDSERLVGFCPFERTEKRAAKLTPSFERFRLLARLLNLRITTPDGERPLTVDEIALVTRDLGKTAKLSIKRVRTLIGLEDNQRFTTIRPEDEDRDIVARTGGAMTGTATLRKALGEALWTDMQERPEQLDAIVQVLSFFEANETITEKLREIGLTLAVLDVLLTALDAGVFAKFKGAAHISTKAARNLLPHLEQGRRYDEACTMAGYDHAASRLSHHGQIVAKTQFNALVTEIGESIANPIARKALIEGLKQIWAMRNHWGLPGSIHVELARDVGNSIEKRREIEKHIEKNTALRARERREVHDLLDLEDVNGDTLLRYRLWKEQGGKCLYTGKAIHIRQIAATDNSVQVDHILPWSRFGDDSFNNKTLCLASANQQKKRSTPYEWLSGQTGDAWNAFVQRIETNKELRGFKKRNYLLKNAKEAEEKFRSRNLNDTRYAARLFAEAVKLLYAFGERQEKGGNRRVFTRPGALTAALRQAWGVESLKKQDGKRINDDRHHALDALTVAAVDEAEIQRLTKSFHEWEQQGLGRPLRRVEPPWESFRADVEATYPEVFVARPERRRARGEGHAATIRQVKERECTPIVFERKAVSSLKEADLERIKDGERNEAIVEAIRSWIATGRPADAPPRSPRGDIITKIRLATTIKAAVPVRGGTAGRGEMVRADVFSKPNRRGKDEWYLVPVYPHQIMNRKAWPKPPMRSIVANKDEDEWTEVGPEHQFRFSLYPRSNIEIIRPSGEVIEGYFVGLHRNTGALTISAHNDPKSIHSGIGTKTLLAISKYQVDRFGRKSPVRKEVRTWHGEACISPTPPG

SEQ ID NO: 145 - protein, 1166 aa, Nitrobacter hamburgensis
  CRISPR-associated endonuclease
  ref <308>: DATABASE ACCESSION NUMBER: YP_571550, NCBI Gene Database
  ref <309>: DATABASE ENTRY DATE: 2013-07-30
MHVEIDFPHFSRGDSHLAMNKNEILRGSSVLYRLGLDLGSNSLGWFVTHLEKRGDRHEPVALGPGGVRIFPDGRDPQSGTSNAVDRRMARGARKRRDRFVERRKELIAALIKYNLLPDDARERRALEVLDPYALRKTALTDTLPAHHVGRALFHLNQRRGFQSNRKTDSKQSEDGAIKQAASRLATDKGNETLGVFFADMHLRKSYEDRQTAIRAELVRLGKDHLTGNARKKIWAKVRKRLFGDEVLPRADAPHGVRARATITGTKASYDYYPTRDMLRDEFNAIWAGQSAHHATITDEARTEIEHIIFYQRPLKPAIVGKCTLDPATRPFKEDPEGYRAPWSHPLAQRFRILSEARNLEIRDTGKGSRRLTKEQSDLVVAALLANREVKFDKLRTLLKLPAEARFNLESDRRAALDGDQTAARLSDKKGFNKAWRGFPPERQIAIVARLEETEDENELIAWLEKECALDGAAAARVANTTLPDGHCRLGLRAIKKIVPIMQDGLDEDGVAGAGYHIAAKRAGYDHAKLPTGEQLGRLPYYGQWLQDAVVGSGDARDQKEKQYGQFPNPTVHIGLGQLRRVVNDLIDKYGPPTEISIEFTRALKLSEQQKAERQREQRRNQDKNKARAEELAKFGRPANPRNLLKMRLWEELAHDPLDRKCVYTGEQISIERLLSDEVDIDHILPVAMTLDDSPANKIICMRYANRHKRKQTPSEAFGSSPTLQGHRYNWDDIAARATGLPRNKRWRFDANAREEFDKRGGFLARQLNETGWLARLAKQYLGAVTDPNQIWVVPGRLTSMLRGKWGLNGLLPSDNYAGVQDKAEEFLASTDDMEFSGVKNRADHRHHAIDGLVTALTDRSLLWKMANAYDEEHEKFVIEPPWPTMRDDLKAALEKMVVSHKPDHGIEGKLHEDSAYGFVKPLDATGLKEEEAGNLVYRKAIESLNENEVDRIRDIQLRTIVRDHVNVEKTKGVALADALRQLQAPSDDYPQFKHGLRHVRILKKEKGDYLVPIANRASGVAYKAYSAGENFCVEVFETAGGKWDGEAVRRFDANKKNAGPKIAHAPQWRDANEGAKLVMRIHKGDLIRLDHEGRARIMVVHRLDAAAGRFKLADHNETGNLDKRHATNNDIDPFRWLMASYNTLKKLAAVPVRVDELGRVWRVMPN

SEQ ID NO: 146 - protein, 1128 aa, Streptococcus thermophilus
  CRISPR-associated endonuclease
  ref <308>: DATABASE ACCESSION NUMBER: YP_141068, NCBI Gene Database
  ref <309>: DATABASE ENTRY DATE: 2013-08-27
MSDLVLGLDIGIGSVGVGILNKVTGEIIHKNSRIFPAAQAENNLVRRTNRQGRRLTRRKKHRIVRLNRLFEESGLITDFTKISINLNPYQLRVKGLTDELSNEELFIALKNMVKHRGISYLDDASDDGNSSVGDYAQIVKENSKQLETKTPGQIQLERYQTYGQLRGDFTVEKDGKKHRLINVFPTSAYRSEALRILQTQQEFNPQITDEFINRYLEILTGKRKYYHGPGNEKSRTDYGRYRTSGETLDNIFGILIGKCTFYPEEFRAAKASYTAQEFNLLNDLNNLTVPTETKKLSKEQKNQIINYVKNEKAMGPAKLFKYIAKLLSCDVADIKGYRIDKSGKAEIHTFEAYRKMKTLETLDIEQMDRETLDKLAYVLTLNTEREGIQEALEHEFADGSFSQKQVDELVQFRKANSSIFGKGWHNFSVKLMMELIPELYETSEEQMTILTRLGKQKRLRLQIKQNISNKTKYIDEKLLTEEIYNPVVAKSVRQAIKIVNAAIKEYGDFDNIVIEMARETNEDDEKKAIQKIQKANKDEKDAAMLKAANQYNGKAELPHSVFHGHKQLATKIRLWHQQGERCLYTGKTISIHDLINNPNQFEVDHILPLSITFDDSLANKVLVYATANQEKGQRTPYQALDSMDDAWSFRELKAFVRESKTLSNKKKEYLLTEEDISKFDVRKKFIERNLVDTRYASRVVLNALQEHFRAHKIDTKVSVVRGQFTSQLRRHWGIEKTRDTYHHHAVDALIIAASSQLNLWKKQKNTLVSYSEEQLLDIETGELISDDEYKESVFKAPYQHFVDTLKSKEFEDSILFSYQVDSKFNRKISDATIYATRQAKVGKDKKDETYVLGKIKDIYTQDGYDAFMKIYKKDKSKFLMYRHDPQTFEKVIEPILENYPNKQMNEKGKEVPCNPFLKYKEEHGYIRKYSKKGNGPEIKSLKYYDSKLLGNPIDITPENSKNKVVLQSLKPWRTDVYFNKATGKYEILGLKYADLQFEKGTGTYKISQEKYNDIKKKEGVDSDSEFKFTLYKNDLLLVKDTETKEQQLFRFLSRTLPKQKHYVELKPYDKQKFEGGEALIKVLGNVANGGQCIKGLAKSNISIYKVRTDVLGNQHIIKNEGDKPKLDF

SEQ ID NO: 147 - protein, 1122 aa, Streptococcus thermophilus
  CRISPR-associated endonuclease
  ref <308>: DATABASE ACCESSION NUMBER: YP_139177, NCBI Gene Database
  ref <309>: DATABASE ENTRY DATE: 2013-06-10
MSDLVLGLDIGIGSVGVGILNKVTGEIIHKNSRIFPAAQAENNLVRRTNRQGRRLTRRKKHRIVRLNRLFEESGLITDFTKISINLNPYQLRVKGLTDELSNEELFIALKNMVKHRGISYLDDASDDGNSSVGDYAQIVKENSKQLETKTPGQIQLERYQTYGQLRGDFTVEKDGKKHRLINVFPTSAYRSEALRILQTQQEFNSQITDEFINRYLEILTGKRKYYHGPGNEKSRTDYGRYRTNGETLDNIFGILIGKCTFYPDEFRAAKASYTAQEFNLLNDLNNLTVPTETKKLSKEQKNQIINYVKNEKVMGPAKLFKYIAKLLSCDVADIKGHRIDKSGKAEIHTFEAYRKMKTLETLDIEQMDRETLDKLAYVLTLNTEREGIQEALEHEFADGSFSQKQVDELVQFRKANSSIFGKGWHNFSVKLMMELIPELYETSEEQMTILTRLGKQKTTSSSNKTKYIDEKLLTEEIYNPVVAKSVRQAIKIVNAAIKEYGDFDNIVIEMARETNEDDEKKAIQKIQKANKDEKDAAMLKAANQYNGKAELPHSVFHGHKQLATKIRLWHQQGERCLYTGKTISIHDLINNPNQFEVDHILPLSITFDDSLANKVLVYATANQEKGQRTPYQALDSMDDAWSFRELKAFVRESKTLSNKKKEYLLTEEDISKFDVRKKFIERNLVDTRYASRVVLNALQEHFRAHKIDTKVSVVRGQFTSQLRRHWGIEKTRDTYHHHAVDALIIAASSQLNLWKKQKNTLVSYSEEQLLDIETGELISDDEYKESVFKAPYQHFVDTLKSKEFEDSILFSYQVDSKFNRKISDATIYATRQAKVGKDKKDETYVLGKIKDIYTQDGYDAFMKIYKKDKSKFLMYRHDPQTFEKVIEPILENYPNKEMNEKGKEVPCNPFLKYKEEHGYIRKYSKKGNGPEIKSLKYYDSKLLGNPIDITPENSKNKVVLQSLKPWRTDVYFNKNTGKYEILGLKYADLQFEKKTGTYKISQEKYNGIMKEEGVDSDSEFKFTLYKNDLLLVKDTETKEQQLFRFLSRTMPNVKYYVELKPYSKDKFEKNESLIEILGSADKSGRCIKGLGKSNISIYKVRTDVLGNQHIIKNEGDKPKLDF

SEQ ID NO: 148 - protein, 1368 aa, Streptococcus pyogenes; identical to SEQ ID NO: 138
  CRISPR-associated endonuclease
  ref <308>: DATABASE ACCESSION NUMBER: NP_664481, NCBI Gene Database
  ref <309>: DATABASE ENTRY DATE: 2013-06-10

SEQ ID NO: 149 - protein, 1269 aa, Mycoplasma gallisepticum
  CRISPR-associated endonuclease
  ref <308>: DATABASE ACCESSION NUMBER: YP_006586107, NCBI Gene Database
  ref <309>: DATABASE ENTRY DATE: 2013-06-11
MNNSIKSKPEVTIGLDLGVGSVGWAIVDNETNIIHHLGSRLFSQAKTAEDRRSFRGARRLIRRRKYKLKRFINLIWKYNSYFGFKNKEDILNNYQEQQKLHNTVLNLKLEALNAKIDPKALSWILHDYLKNRGHFYEDNRDFNVYPTEELANYFGEYGYYKGIIDSKEDNDDKLEEGLTKYKFSNQHWLEEIKKVLSNQTGLPEKFKEEYESLFSYVRNYSEGPGSINSVSPYGIYHLDEKEGKVVQKYNNIWDKTIGKCSIFPDEYRAPKNSPIAMIFNEINELSTIRSYSIYLTGWFINQEFKKAYLNKLLDLLIKTNSEKPIDARQFKKLREETIAESIGKETLKDVEREEKLEKEDHKWKLKGLKLNTNGKIQYNDLSSLAKFVHKLKQHLKLDFLLEDQYTTLDKINFLQSLFVYLGKHLRYSNRVDSANLKEFSDSNKLFERVLQEQKDDLFKLFEQTDKDDEKILAQTHSLSTKAMLLAITRMTNLDNDEDNQKNNDKGWNFEAIKNFDQKFIDITKKNNNLSLKQDKRYLDDRFINDAILSPGVKRILREATKVFNAILKQFSEEYDVTKVVIELARELSEEKELENTKNYEKLIKKNSDKISERLEALDIAEDKIEDILKSPTKSYKVLLWLQQDHIDPYSQKEIAFEDILTKTEKTEIDHIIPYSISFDDSSSNKLLVLAESNQAKSNQTPYEFITSGNAGIKWEDYEAYCRKFKDGDTSLLDSTQRSKKFAKMMKTDTSSKYDIGFLARNLNDTRYATIVFRDALKDYANNHLVEDKPMFKVVCINGGVTSFLRKNFDKSWYAKKDRDKNIHHAVDASIISIFSNETKTLFNQLTQFADYKLFKNTDGSWKKIDPKTGVVTEVTDENWKQIRVRNQVSEIAKVINKCIQDSNIERKARYSRKIENKTNISLFNDTVYSAKKVGYEDQIKRKNLKTLDIHESAEENKNSKVKKQFVYRKLVNVSLLNNDKLADLFAEKEDILMYRANPWVINLAEQIFNEYTENKKIKSQNVFEKYMLDLTKEFPEKFSEAFVKSMLRNKTAIIYNVEKKVVHRIKRLKILSSELKENKLSNVIIRSKNESGTKLSYQDTINSIALMIMRSIDPTAKKQYIRVPLNTLNLHLGDQDFDLHNIDAYLKKPKFVKYLKANEIGDEYKPWRVLTSGTLLIHKKDKKLMYISSFQNLKDVIEIKNLIETEYKENDDSDPKKKKKANRFLMTLSTILNDYILLDAKDNFDILGLSKNRIDEILNSKLGLDKITK

SEQ ID NO: 150 - protein, 1269 aa, Mycoplasma gallisepticum; identical to SEQ ID NO: 149
  CRISPR-associated endonuclease
  ref <308>: DATABASE ACCESSION NUMBER: YP_006584600, NCBI Gene Database
  ref <309>: DATABASE ENTRY DATE: 2013-06-11

SEQ ID NO: 151 - protein, 1224 aa, Mycoplasma gallisepticum
  CRISPR-associated endonuclease
  ref <308>: DATABASE ACCESSION NUMBER: YP_006583854, NCBI Gene Database
  ref <309>: DATABASE ENTRY DATE: 2013-06-11
MNNSIKSKPEVTIGLDLGVGSVGWAIVDNETNIIHHLGSRLFSQAKTAEDRRSFRGARRLIRRRKYKLKRFINLIWKYNSYFGFKNKEDILNNYQEQQKLHNTVLNLKLEALNAKIDPKALSWILHDYLKNRGHFYEDNRDFNVYPTEELANYFGEYGYYKGIIDSKEDNDDKLEEGLTKYKFSNQHWLEEIKKVLSNQTGLPEKFKEEYESLFSYVRNYSEGPGSINSVSPYGIYHLDEKEGKVVQKYNNIWDKTIGKCSIFPDEYRAPKNSPIAMIFNEINELSTIRSYSIYLTGWFINQEFKKAYLNKLLDLLIKTNSEKPIDARQFKKLREETIAESIGKETLKDVEREEKLEKEDHKWKLKGLKLNTNGKIQYNDLSSLAKFVHKLKQHLKLDFLLEDQYTTLDKINFLQSLFVYLGKHLRYSNRVDSANLKEFSDSNKLFERVLQEQKDDLFKLFEQTDKDDEKILAQTHSLSTKAMLLAITRMTNLDNDEDNQKNNDKGWNFEAIKNFDQKFIDITKKNNNLSLKQDKRYLDDRFINDAILSPGVKRILREATKVFNAILKQFSEEYDVTKVVIELARELSEEKELENTKNYEKLIKKNSDKISERLEALDIAEDKIEDILKSPTKSYKVLLWLQQDHIDPYSQKEIAFEDILTKTEKTEIDHIIPYSISFDDSSSNKLLVLAESNQAKSNQTPYEFITSGNAGIKWEDYEAYCRKFKDGDTSLLDSTQRSKKFAKMMKTDTSSKYDIGFLARNLNDTRYATIVFRDALKDYANNHLVEDKPMFKVVCINGGVTSFLRKNFDKSWYAKKDRDKNIHHAVDASIISIFSNETKTLFNQLTQFADYKLFKNTDGSWKKIDPKTGVVTEVTDENWKQIRVRNQVSEIAKVINKCIQDSNIERKARYSRKIENKTNISLFNDTVYSAKKVGYEDQIKRKNLKTLDIHESAEENKNSKVKKQFVYRKLVNVSLLNNDKLADLFAEKEDILMYRANPWVINLAEQIFNEYTENKKIKSQNVFEKYMLDLTKEFPEKFSEAFVKSMLRNKTAIIYNVEKKVVHRIKRLKILSSELKENKLSNVIIRSKNESGTKLSYQDTINSIALMIMRSIDPTAKKQYIRVPLNTLNLHLGDQDFDLHNIDAYLKKPKFVKYLKANEIGDEYKPWRVLTSGTLLIHKKDKKLMYISSFQNLKDVIEIKNLIETEYKENDDSDPKKRRKQIGS

SEQ ID NO: 152 - protein, 1269 aa, Mycoplasma gallisepticum; identical to SEQ ID NO: 149
  CRISPR-associated endonuclease
  ref <308>: DATABASE ACCESSION NUMBER: YP_006583094, NCBI Gene Database
  ref <309>: DATABASE ENTRY DATE: 2013-06-11

SEQ ID NO: 153 - protein, 1269 aa, Mycoplasma gallisepticum; identical to SEQ ID NO: 149
  CRISPR-associated endonuclease
  ref <308>: DATABASE ACCESSION NUMBER: YP_006582323, NCBI Gene Database
  ref <309>: DATABASE ENTRY DATE: 2013-06-11

SEQ ID NO: 154 - protein, 1371 aa, Streptococcus pyogenes
  CRISPR-associated endonuclease
  ref <308>: DATABASE ACCESSION NUMBER: YP_602415, NCBI Gene Database
  ref <309>: DATABASE ENTRY DATE: 2013-08-28
MDKKYSIGLDIGTNSVGWAVITDDYKVPSKKFKVLGNTDRHSIKKNLIGALLFDSGETAEATRLKRTARRRYTRRKNRICYLQEIFSNEMAKVDDSFFHRLEESFLVEEDKKHERHPIFGNIVDEVAYHEKYPTIYHLRKKLADSTDKADLRLIYLALAHMIKFRGHFLIEGDLNPDNSDVDKLFIQLVQTYNQLFEENPINASRVDAKAILSARLSKSRRLENLIAQLPGEKKNGLFGNLIALSLGLTPNFKSNFDLAEDAKLQLSKDTYDDDLDNLLAQIGDQYADLFLAAKNLSDATLLSDILRVNSEITKAPLSASMIKRYDEHHQDLTLLKALVRQQLPEKYKEIFFDQSKNGYAGYIDGGASQEEFYKFIKPILEKMDGTEELLAKLNREDLLRKQRTFDNGSIPHQIHLGELHAILRRQEDFYPFLKDNREKIEKILTFRIPYYVGPLARGNSRFAWMTRKSEETITPWNFEEVVDKGASAQSFIERMTNFDKNLPNEKVLPKHSLLYEYFTVYNELTKVKYVTEGMRKPAFLSGEQKKAIVDLLFKTNRKVTVKQLKEDYFKKIECFDSVEISGVEDRFNASLGTYHDLLKIIKDKDFLDNEENEDILEDIVLTLTLFEDKEMIEERLKTYAHLFDDKVMKQLKRRHYTGWGRLSRKLINGIRDKQSGKTILDFLKSDGFANRNFIQLIHDDSLTFKEAIQKAQVSGQGHSLHEQIANLAGSPAIKKGILQSVKVVDELVKVMGHKPENIVIEMARENQTTQKGQKNSRERMKRIEEGIKELGSQILKEHPVENTQLQNEKLYLYYLQNGRDMYVDQELDINRLSDYDVDHIVPQSFIKDDSIDNKVLTRSDKNRGKSDDVPSEEVVKKMKNYWRQLLNAKLITQRKFDNLTKAERGGLSELDKAGFIKRQLVETRQITKHVAQILDSRMNTKYDENDKLIREVKVITLKSKLVSDFRKDFQFYKVREINNYHHAHDAYLNAVVGTALIKKYPKLESEFVYGDYKVYDVRKMIAKSEQEIGKATAKRFFYSNIMNFFKTEITLANGEIRKRPLIETNEETGEIVWDKGRDFATVRKVLSMPQVNIVKKTEVQTGALTNESIYARGSFDKLISRKHRFESSKYGGFGSPTVTYSVLVVAKSKVQDGKVKKIKTGKELIGITLLDKLVFEKNPLKFIEDKGYGNVQIDKCIKLPKYSLFEFENGTRRMLASVMANNNSRGDLQKANEMFLPAKLVTLLYHAHKIESSKELEHEAYILDHYNDLYQLLSYIERFASLYVDVEKNISKVKELFSNIESYSISEICSSVINLLTLTASGAPADFKFLGTTIPRKRYGSPQSILSSTLIHQSITGLYETRIDLSQLGSD

SEQ ID NO: 155 - protein, 151 aa, Xanthomonas axonopodis
  pv. citri
  CRISPR-associated endonuclease
  ref <308>: DATABASE ACCESSION NUMBER: NP_643570, NCBI Gene Database
  ref <309>: DATABASE ENTRY DATE: 2013-06-10
MGHPPVLCPHSQTVPGARGPPNGGTGILSIPELPISKKRLKTFRLLAFHAQHGRCFYFTLPTWLASPNELGLRPRSARPYQCTAKHLVACQDGGKDVVGNVVAAHAACNHRRHKRTAPVPSATDYRTFVQRQLAKGKWCPQWIYGLSIGTP

SEQ ID NO: 156 - protein, 1381 aa, Streptococcus suis
  CRISPR-associated endonuclease
  ref <308>: DATABASE ACCESSION NUMBER: YP_006359179, NCBI Gene Database
  ref <309>: DATABASE ENTRY DATE: 2013-06-11
MVKKKYAIGIDIGTNSVGWSIVTDDYKVPSKKMKVFGNTEKRYIKKNLLGTLLFDEGNTAENRRLKRTARRRYTRRRNRILYLQEIFAEEINKIDDSFFQRLDDSFLIVEDKQGSKHPIFGTLQEEKEYHKQFPTIYHLRKQLADSSQKADIRLIYLALAHIIKYRGHFLFEGDLKSENKDVQHLFNDFVEMFDKTVEGSYLSENLPNVADVLVEKVSKSRRLENILHYFPNEKKNGLFGNFLALALGLQPNFKTNFELAEDAKIQFSKETYEEDLEELLGKIGDDYADLFIATKSLYDGILLAGILSTTDSTTKAPLSSSMVNRYEEHQKDLALLKNFIHQNLSDSYKEVFNDKLKDGYAGYIEGKTTQENFYRFIKKAIEKIEGSNYFIDKIDREDFLRKQRTFDNGSIPHQIHLQEMHAIIRRQAEFYPFLVENQDKIEKILTFRIPYYVGPLARGKSEFAWLNRKSDEKIRPWNFDEMVDKETSAENFITRMTNYDRYLPDQKVLPKHSLLYEKFAVYNELTKVKFIAEGMRDYQFLDSGQKKDIVKTLFKTKRKVTAKDIKAYLENSNGYAGVELKGLEEQFNASLPTYHDLLKILRDKAFIDAEENQEILEDIVLTLTLFEDREMIRKRLEKYKDILTEEQRKKLERRHYTGWGRLSAKLINGILDKVTRKTILGYLIDDGTSNRNFMQLINDDTLSFVDEIRLAQGSGEAEDYRAEVQNLAGSPAIKKGILQSLKIVDELIEVMGYEPEHIVVEMARENQFTNQGRRNSQQRINRLENALKDFGSKILEEQKPYGVSKVNNIHLQSDRLFLYYLQNGKDMYTDEELDIDHLSEYDIDHIIPQAFIKDDSLDNKVLTKSAKNRGKSDDVPSMEIVHNRKNFWRQLLKSKLISQRKFDNLTKAERGGLTNEDKARFIQRQLVETRQITKHVARMLDTRFNTKLDEAGNRIRDPKVNIITLKSNLVSQFRKDYQLYKIREINNYHHAHDAYINAVVATALLKKYPQLAPEFVYGEYPTYNSYNSRKSATEKVLFYSNIMNFFKRIVVHSKTGEVRIRPVIEVNKETGEIVWDKKSDFRTVRKVLSYPQVNVVKKTEVQNHGLDRGKPKGFYNANLSPRPKEGSVENLVPAKQSFDTKRYGGYAGISNSYAVLVNGIIEKGKKKSKAEVTEFQGISILARKDFDKNPKQYLLNLGYKDIKSIIKLPKYSLFELENGSRRMLASILSTNNKRGEIHKGNEMYLPDKFVTLLYHAMRVNRTLEPGHKKYVETHRHVFDELLIYILEYNEKIVGAKANGKRIVEAYSARKDTDNLEELCNSFINLLNLTALGSAVDFEFLGTKIPRYRDYTPSSLLKATLIHQSVTGLYETRIDLSKLGGD

SEQ ID NO: 157 - protein, 1122 aa, Streptococcus suis
  CRISPR-associated endonuclease
  ref <308>: DATABASE ACCESSION NUMBER: YP_006080899, NCBI Gene Database
  ref <309>: DATABASE ENTRY DATE: 2013-06-11
MSNGKILGLDIGIASVGVGVIDAQTGEIIHASSRIFPSANAANNAERRTFRGSRRLIRRKKHRIKRLDDLFNDFHINLDGEMSTDNPYVLRVKGLSQKLTVEELYISIKNIMKRRGISYLDDAESDNEAGRSDYAKAIERNRQLLTSKTPGEIQLERLEKYGQLRGNFTIIDEEGQSQQIINVFSTSDYVKEVEKILDCQKMYHKFISDEFCDKLIELLREKRKYYVGPGNEKSRTDYGIYRTDGTTLENLFGILIGKCTFYPDQYRSSRASYTAQEFNFLNDLNNLTVPTETKKLSQEQKEFLVNYAKETSVLGAGKILQQIAKLADCKVEDIRGYRLDNKDKPELHTFETYRAMKGLVPLVDIGVLSREQLDILADILTLNTDFEGIREALKKQLPNVFDEKQVKGLASFRKSKSQLFAKGWHNLSQKIMLEVIPELYATSDEQMTILTRLGKFEKSSVAEYPSSINVDEITDEIYNPVVAKSIRQTIKIINASIKKWDEFDQIVIEMPRDRNEDEEKKRIADGQKANAKEKADSILRAAELYCAGKVLPDYVYNGHNQLATKIRLWYQQGERCIYTGQPISIHDLIHNQNQYEIDHILPLSLTFDDSLSNKVLVLATANQEKAQRTPYNYLKSATSAWSYREFKDYVTKRKGIGKKKCEYLTFEEDINGFEVRSKFIQRNLVDTRYASKVILNALQDYFKISGIQTKVSVVRGQFTSQLRHKWGIEKTRETYHHHAVDALIIAASSQLRLWKKQESPLVVDYQEGRQVDLETGEILELTDEQYKELVYQPPYQGFVNTISSSAFDNEILFSYQVDSKVNRKISDATIYATRNAQLGKDKTEGIYVLGKIKDIYTQAGYEAFLKRYTKDKTSFLMYHKDLDTWEKVIEIILRDYREYDEKGKEIGNPFERYRRENGYVKKYSRKGNGTAIKSLKYYDNKLGNHIDITPENSRNAVVLQSLKPWRTDVYFNKETGKYEFLGIKYSDLSFEKGTGEYGISQEKYDSIKIAEGVAKKSIFKFTLYKQDLLFIKDIENNFGKLLRFTSKNDTSKHYVELKPYDKNKFGTEEPLLPVLGNVAKSGQCIKGLNKSNISIYKVRTDILGYRHFIKQEGEHPQLKFKK

SEQ ID NO: 158 - protein, 1064 aa, Bradyrhizobium sp.
  CRISPR-associated endonuclease
  ref <308>: DATABASE ACCESSION NUMBER: YP_001239928, NCBI Gene Database
  ref <309>: DATABASE ENTRY DATE: 2013-06-10
MKRTSLRAYRLGVDLGANSLGWFVVWLDDHGQPEGLGPGGVRIFPDGRNPQSKQSNAAGRRLARSARRRRDRYLQRRGKLMGLLVKHGLMPADEPARKRLECLDPYGLRAKALDEVLPLHHVGRALFHLNQRRGLFANRAIEQGDKDASAIKAAAGRLQTSMQACGARTLGEFLNRRHQLRATVRARSPVGGDVQARYEFYPTRAMVDAEFEAIWAAQAPHHPTMTAEAHDTIREAIFSQRAMKRPSIGKCSLDPATSQDDVDGFRCAWSHPLAQRFRIWQDVRNLAVVETGPTSSRLGKEDQDKVARALLQTDQLSFDEIRGLLGLPSDARFNLESDRRDHLKGDATGAILSARRHFGPAWHDRSLDRQIDIVALLESALDEAAIIASLGTTHSLDEAAAQRALSALLPDGYCRLGLRAIKRVLPLMEAGRTYAEAASAAGYDHALLPGGKLSPTGYLPYYGQWLQNDVVGSDDERDTNERRWGRLPNPTVHIGIGQLRRVVNELIRWHGPPAEITVELTRDLKLSPRRLAELEREQAENQRKNDKRTSLLRKLGLPASTHNLLKLRLWDEQGDVASECPYTGEAIGLERLVSDDVDIDHLIPFSISWDDSAANKVVCMRYANREKGNRTPFEAFGHRQGRPYDWADIAERAARLPRGKRWRFGPGARAQFEELGDFQARLLNETSWLARVAKQYLAAVTHPHRIHVLPGRLTALLRATWELNDLLPGSDDRAAKSRKDHRHHAIDALVAALTDQALLRRMANAHDDTRRKIEVLLPWPTFRIDLETRLKAMLVSHKPDHGLQARLHEDTAYGTVEHPETEDGANLVYRKTFVDISEKEIDRIRDRRLRDLVRAHVAGERQQGKTLKAAVLSFAQRRDIAGHPNGIRHVRLTKSIKPDYLVPIRDKAGRIYKSYNAGENAFVDILQAESGRWIARATTVFQANQANESHDAPAAQPIMRVFKGDMLRIDHAGAEKFVKIVRLSPSNNLLYLVEHHQAGVFQTRHDDPEDSFRWLFASFDKLREWNAELVRIDTLGQPWRRKRGLETGSEDATRIGWTRPKKWP

SEQ ID NO: 159 - protein, 765 aa, Butyrivibrio fibrisolvens
  CRISPR-associated endonuclease
  ref <308>: DATABASE ACCESSION NUMBER: YP_007818384, NCBI Gene Database
  ref <309>: DATABASE ENTRY DATE: 2013-08-27
MGITIGLDLGVASVGWAVVNDDYEILESCSNIFPSADASKNSERRGFRQGRRLTRRRKNRIHDFQKLWEDKGFVIPSQGTEDVLAIKIKGLSEKLSVDEVYWVLLNSLKHRGISYLDDADSGDNSSDYAKSISRNEEELKEKLPCEIQWERLQKYGAYRGNISIVEDGEPITLRNVFTTSAYKKEVEQFIDTQAKYNAQYSGDFKADYLEIFNRKREYYEGPGNELSRTDYGKYTTEINADGEYITVDNIFDKLVGKCSVNPDERRAAGASYTAQEFNVLNDLNNLTISSESSFIEDGKLTEDAKRKIIETIKNAKTVNVKKIICDVIGDKKCQISGARIDKNEKEIFHSFEAYNKMRRALEEIGFDISSLSRENLDLIGDILTLNTDRESILNAFNRKGIELADEAKDILVKVRKTNGSLFNKWQSFGLSIMNELIPELYAQPKNQMELLTAMGVFKSRGDRFLECKEIPGDLIVDDIYNPVVSKTVRITVRILNALIKKYGYPDRVVIEMPRDKNSDEEQQRLKKEQRDNENEIKDIKARVKTEYGREITEEDFRQHSKLSLKLKLWNEQQGICPYSGKSIKIDDLLDNPNLFEVDHIIPLSISFDDSRNNKVLVYSSENQDKGNRTPLAYLASVNRQWDIHSFMDYVLKTYAGAQKRKKRDNLLNEQDITKVEVLQGFVNRNINDTRYASKVVLNSLQEYFSSKECSTKVKVIRGSFTHQMRVNLKLKKTVMNHMFIMQLMQCLLLFHRWDMTLIMNLQISI

SEQ ID NO: 160 - protein, 1027 aa, Bdellovibrio exovorus
  CRISPR-associated endonuclease
  ref <308>: DATABASE ACCESSION NUMBER: YP_007644735, NCBI Gene Database
  ref <309>: DATABASE ENTRY DATE: 2013-06-11
MKYTLGLDVGTNSIGWAVLELNTNGEPQRIEKLGSRIFTDGRHPKDGTTLASKRRQKRHERRRRDRLHQRKKLVLNQLVSMGLFPQSEQEQQDLKSLDVLTLRANGVSKQLSAYELGRVFYYLNLKRGFKSNRKGGSEEDKANKISERIKKLQEQLKENDFKTVGQYLHDRYIKGLSTKATIENDFHLLRQLIEDEFDFIVETQSKFFPEISDEQWNTLRNRMFHQRPLKPVETGTCSLFEDKKRTYKYMPSFEEYRFLTELFNLSYQDENFHSHSLSSEQIFKVFHELKNTREATYTKIKKLLKLPSDLSFSIERSKSKDKIKISTTNHFFSKSLLFAEEWASLDLKLKDEVAEIYFSDMSVEEIKKGLLQLKIDSEIIENLLEEKVPNVQEATCSYSKEALQKIVSLILEEERHPTLIVDDLFKNEKEETSLIDRLDYYGASIPDSMQPIPQHIKDNNLTLNEDEKRYGKIANPTVHAALNQIRQVVNDLIEQYGKPTNIHIEFARDLKKSKEERDFDNRKKKKNEELNEQVRDFIEKHNQKPSAFNFERVKLWFELDAMNNQVCAYSGKTISARMVLSDEVQVDHILPFSRTLDDSLANKVLVLASENVKKRNRTPYEAFGQDTEKWASIQELAKRLPYHKQWRFAEDAIKKFEEKDQFLQRHLNDTRYISKIAKKYLGSITDPYKIVASRGQMTSIIRGKLGLNQFIQKPDGTKNREDHRHHAIDALTVALTSRSYLKRISDASARNQDPNRIPIPEPWKGFIKDADVKFNEIIVSHKVDHGKNGPFMEETCFGLIKNPNKYEEENDFKLITTKSLDSVKDPSTIRSQSLQNLAEKSGVISLAKSGVKKLRVYDVTKENPADIGLIESGLAKITHGKDKQHVKHYQKGDINYLAIWCLPQNITLKSDNHKKRKTDYIFTAIKTFDLNSKNPNDLRPHPAAKLVTKVYKGDTVALEVNNQLNYYIVKSIRAANKKLYFLKINQSSELANETQFIPAYTKLVDYKFRKVSVSPTGVITDNGPLLK

SEQ ID NO: 161 - protein, 1239 aa, Mycoplasma cynos
  CRISPR-associated endonuclease
  ref <308>: DATABASE ACCESSION NUMBER: YP_007258684, NCBI Gene Database
  ref <309>: DATABASE ENTRY DATE: 2013-06-11
MEEKRKVTLGFDLGVASVGWAIVDSETNEVYKLGSRLFDIPDTNIDRRAKRGSRRLVRRRSYRNQKFYNLIKRTKTFGFLDKEAIEKEFVLLSIKYPNIIELKVKGLQEEVSKSEAVWILHDYLKNRGYFYDDKEEKDDLENPSIESMPSYKLYEFYKEYGYFKGALSSPTESEKNKDSDLEKAIFFNFSNKEWTKEINHFFKIQKNIFSEDFKAKFMEFFSFIRDISKGPGSENMPSQYSIFGKYGDDGMGGKYQHIWDKNIGKCSIFKDKVRAPKYLPSALFFNLLNELSNIRLYSVDKREKSVLWRLSSKDKINIILNILQIILFKNDGKISNLDINKIVKNESIKSIILNEIDLDLIKDMWFEKEPNVYGIGLSGLNIEENKKENRFKFQDLKIFSVFIDLLKKSNINIEFNNEKDIIHNLKLLDELYFFLITQKYSRDKYGSIKKFILNNKSFNIDNLDEKLNIFLSISDDEFDNHNSKTHSLSKEAIYFIFPKLLHNNEGWNLEAIKNYDIDVREEISKHSFGIKKQDKKYLDDAFLDDAILPPSVKVTIKQSILIFNKIIKKFSNKFQIDNVVIELAREMTQEKEMDAQKSLNRLKKSRKKIIEERLNANNIDSKMFRDKTGEISPNYIYKIYLWISQNFKDPYTGENISANDILKNNVEIDHIIPYSLCFDDSSSNKVLVFKHSNQSKGNFLPFDMISTFSENSVWNWKEYTQYVEKTFKTNLESILDKKERVKKADNLLTSSYDGYDKLGFLARNLNDTRYATILFRDQLINYSENHLIDSKKMFKVIAMNGGVTSFIRKNMSFDSGLKVKDRSIFSHHAYDAAIIALFSNKTKILYNLINPSLDGIISKRSEGYWVLEDRLTGEIRKLNYNDWQSIKNNVEVKKIAREIESHLSNLDNVVMFSRKSKRKTNKELYNETLYGIATRIDENGIKNYYKKEKFNILEDENIYLRLLNERENFIINRSNPEVIDAIIEIFETIDKNKIPARDVAKNIKYTDNKIKYNLYLKDYMRKLVDEFPDKFRKDFIEQMIAKKIFILFNPIKNTTRKIKSLRSINNNKIEDIRKKQVLEKFNTAKNEPRSFYESLNSLGAIIFKNNLNIYKKMSISSQIATFGDKNWKIDDINTYNKEKLNKYKEIYGIDETYDFYSFIFPGTILLDEKNKEFLYISSIQTLKDKIELKFLDRIEFEKKNVNSNLKPKIKREIISTKKLMSDYKIIKISPLGINKKIFE

SEQ ID NO: 162 - protein, 1370 aa, Streptococcus agalactiae
  CRISPR-associated endonuclease
  ref <308>: DATABASE ACCESSION NUMBER: YP_006951177, NCBI Gene Database
  ref <309>: DATABASE ENTRY DATE: 2013-06-11
MNKPYSIGLDIGTNSVGWSIITDDYKVPAKKMRVLGNTDKEYIKKNLIGALLFDGGNTAADRRLKRTARRRYTRRRNRILYLQEIFAEEMSKVDDSFFHRLEDSFLVEEDKRGSKYPIFATMQEEKDYHEKFPTIYHLRKELADKKEKADLRLVYLALAHIIKFRGHFLIEDDRFDVRNTDIQKQYQAFLEIFDTSFENNHLLSQNVDVEAILTDKISKSAKKDRILAQYPNQKSTGIFAEFLKLIVGNQADFKKHFNLEDKTPLQFAKDSYDEDLENLLGQIGDEFADLFSAAKKLYDSVLLSGILTVTDLSTKAPLSASMIQRYDEHREDLKQLKQFVKASLPEKYQEIFADSSKDGYAGYIEGKTNQEAFYKYLSKLLTKQEDSEYFLEKIKNEDFLRKQRTFDNGSIPHQVHLTELKAIIRRQSEYYPFLKENQDKIEKILTFRIPYYVGPLARGNSDFAWMTRKTDDSIRPWNFEDLVDKEKSAEAFIHRMTNNDLYLPEEKVLPKHSLIYEKFTVYNELTKVRYKNEQGETYFFDSNVKQEIFDGVFKEHRKVSKKQLLDFLAKEFEEFRIVDVTGLDKENKAFNASLGTYHDLKKILDKDFLDNPDNESILEDIVQTITLFEDREMIKKRLENYKDLFTESQLKKLYRRHYTGWGRLSAKLINGIRDRESQKTILDYLISDGRANRNFMQLINDDGLSFKSIISKAQSGSHSDNLKEVVGELAGSPAIKKGILQSLKIVDELVKVMGYEPEQIVVEMARENQTTNQGRRNSRQRYKLLEDGVKNLASDLNGDILKEYPTDNQALQNERLFLYYLQNGRDMYTGEALDIDNLSQYDIDHIVPQAFIKDDSIDNRVLVSSAKNRGKSDDVPSIDIVKARKAFWKKLLDAKLISQRKYDNLTKAERGGLTPDDKAGFIQRQLVETRQITKHVARILDERFNNKVDDNNKPIRKVKIVTLKSNLVSNFRKEFGFYKIREVNNYHHAHDAYLNAVVAKAILTKYPQLEPEFVYGDYPKYNSYKTRKSATEKLFFYSNIMNFFKTKVTLADETVVVKDDIEVNNETGEIAWDKKKHFATVRKVLSYPQVNIVKKTEVQTGGFSKESILAHSNSDKLIPRKTKDIYLDPKKYGGFDSPIVAYSVLVLADIKKGKAQKLKTVKELIGITIMERERFEKNPSAFLESKGYLNIRTDKLIILPKYSLFELENGRRRLLASAGELQKGNELALPTQYMKFLYLASRYNESKGKPEEIEKKQEFVNQHVSYFDDILQLINDFSKRVILADANLEKINKLYSDNKDNTPVDELAKNIINLFTFTSLGAPAAFKFFDKSVDRKRYTSTKEVLDSTLIHQSITGLYETRIDLGKLGED

SEQ ID NO: 163 - protein, 1368 aa, Streptococcus pyogenes; identical to SEQ ID NO: 133
  CRISPR-associated endonuclease
  ref <308>: DATABASE ACCESSION NUMBER: YP_006932845, NCBI Gene Database
  ref <309>: DATABASE ENTRY DATE: 2013-06-11

SEQ ID NO: 164 - protein, 1509 aa, Psychroflexus torquis
  CRISPR-associated endonuclease
  ref <308>: DATABASE ACCESSION NUMBER: YP_006866082, NCBI Gene Database
  ref <309>: DATABASE ENTRY DATE: 2013-06-11
MKRILGLDLGTNSIGWSLIEHDFKNKQGQIEGLGVRIIPMSQEILGKFDAGQSISQTADRTKYRGVRRLYQRDNLRRERLHRVLKILDFLPKHYSESIDFQDKVGQFKPKQEVKLNYRKNEKNKHEFVFMNSFIEMVSEFKNAQPELFYNKGNGEETKIPYDWTLYYLRKKALTQQITKEELAWLILNFNQKRGYYQLRGEDIDEDKNKKYMQLKVNNLIDSGAKVKGKVLYNVIFDNGWKYEKQIVNKDEWEGRTKEFIITTKTLKNGNIKRTYKAVDSEIDWAAIKAKTEQDINKANKTVGEYIYESLLDNPSQKIRGKLVKTIERKFYKEEFEKLLSKQIELQPELFNESLYKACIKELYPRNENHQSNNKKQGFEYLFTEDIIFYQRPLKSQKSNISGCQFEHKIYKQKNKKTGKLELIKEPIKTISRSHPLFQEFRIWQWLQNLKIYNKEKIENGKLEDVTTQLLPNNEAYVTLFDFLNTKKELEQKQFIEYFVKKKLIDKKEKEHFRWNFVEDKKYPFSETRAQFLSRLAKVKGIKNTEDFLNKNTQVGSKENSPFIKRIEQLWHIIYSVSDLKEYEKALEKFAEKHNLEKDSFLKNFKKFPPFVSDYASYSKKAISKLLPIMRMGKYWSESAVPTQVKERSLSIMERVKVLPLKEGYSDKDLADLLSRVSDDDIPKQLIKSFISFKDKNPLKGLNTYQANYLVYGRHSETGDIQHWKTPEDIDRYLNNFKQHSLRNPIVEQVVMETLRVVRDIWEHYGNNEKDFFKEIHVELGREMKSPAGKREKLSQRNTENENTNHRIREVLKELMNDASVEGGVRDYSPSQQEILKLYEEGIYQNPNTNYLKVDEDEILKIRKKNNPTQKEIQRYKLWLEQGYISPYTGKIIPLTKLFTHEYQIEHIIPQSRYYDNSLGNKIICESEVNEDKDNKTAYEYLKVEKGSIVFGHKLLNLDEYEAHVNKYFKKNKTKLKNLLSEDIPEGFINRQLNDSRYISKLVKGLLSNIVRENGEQEATSKNLIPVTGVVTSKLKQDWGLNDKWNEIIAPRFKRLNKLTNSNDFGFWDNDINAFRIQVPDSLIKGFSKKRIDHRHHALDALVVACTSRNHTHYLSALNAENKNYSLRDKLVIKNENGDYTKTFQIPWQGFTIEAKNNLEKTVVSFKKNLRVINKTNNKFWSYKDENGNLNLGKDGKPKKKLRKQTKGYNWAIRKPLHKETVSGIYNINAPKNKIATSVRTLLTEIKNEKHLAKITDLRIRETILPNHLKHYLNNKGEANFSEAFSQGGIEDLNKKITTLNEGKKHQPIYRVKIFEVGSKFSISEDENSAKSKKYVEAAKGTNLFFAIYLDEENKKRNYETIPLNEVITHQKQVAGFPKSERLSVQPDSQKGTFLFTLSPNDLVYVPNNEELENRDLFNLGNLNVEQISRIYKFTDSSDKTCNFIPFQVSKLIFNLKKKEQKKLDVDFIIQNEFGLGSPQSKNQKSIDDVMIKEKCIKLKIDRLGNISKA

SEQ ID NO: 165 - protein, 987 aa, Campylobacter jejuni
  CRISPR-associated endonuclease
  ref <308>: DATABASE ACCESSION NUMBER: YP_006858515, NCBI Gene Database
  ref <309>: DATABASE ENTRY DATE: 2013-07-07
MARILAFDIGISSIGWAFSENDELKDCGVRIFTKAENPKTGESLALPRRLARSARKRLARRKARLNHLKHLIANEFKLNYEDYQSFDESLAKAYKGSLISPYELRFRALNELLSKQDFARVILHIAKRRGYDDIKNNGDEEKSEILKAIKQNEEKLVNYQSVGEYLYKEYFQKFKENSKEFINVRNKKESYERCIAQSFLKDELKLIFQKQREFGFSFSKKFEEEVLSVAFYKRALKDFSHLVGNCSFFTDEKRAPKNSPLAFMFVALTRIINLLNNLKNTEGILYTKDDLNTLLNEVLKNGTLTYKQTKKLLGLSDDYEFKGEKGTYFIEFKKYKEFIKALGEHNLSQDNLNEIAKDITLIKDEIKLKKALAKYDLNQNQIDSLSKLEFKDHLNISFKALKLITPLMLEGKKYDEAYNELNLKVAINEDKKDFLPAFNETYYKDEVTNPVVLRAIKEYRKVLNALLKKYGKVHKINIELAREVGKNHSQRAKIEKEQNENYKAKKDAELECEKLGLKINSKNILKLRLFKEQKEFCAYSGEKIKISDLQDEKMLEIDHIYPYSRSFDDSYMNKVLVFTKQNQEKLNQTPFEAFGNDSAKWQKIEVLAKNLPTKKQKRILDKNYKDKEQKDFKDRNLNDTRYIARLVLNYTKDYLDFLPLSDDENTKLNDTQKGSKVHVEAKSGMLTSALRHTWGFSAKDRNNHLHHAIDAVIIAYANNSIVKAFSDFKKEQESNSAELYAKKISELDYKNKRKFFEPFSGFRQKVLDKIDEIFVSKPERKKPSGALHEETFRKEEEFYQSYGGKEGVLKALELGKIRKVNGKIVKNGDMFRVDIFKHKKTNKFYPVPIYTMDFALKVLPNKAVVQGKDKKSGLIKDWILMDENYEFCFSLYKDSLILIQTKDMQEPELVYFNAFTSSTVSLIVSKHDNKFETLSKNQKILFKNANEKEVIAKSIGIQNLKVFEKYIVSALGEVTKAEFRQREDFKK

SEQ ID NO: 166 - protein, 1054 aa, Actinobacillus suis
  CRISPR-associated endonuclease
  ref <308>: DATABASE ACCESSION NUMBER: YP_006816880, NCBI Gene Database
  ref <309>: DATABASE ENTRY DATE: 2013-08-28
MKLTPLNYILGLDLGIASVGWAVVEIDEQENPLGLIDVGVRTFDRAEVPKTGESLALARRLARSARRLVKRRADRIKKAKRLLKAENILLSADEHLPNDVWQLRVKGLDQKLERQEWAAVLLHLLKHRGYLSQRKNESKSENKELGALLSGVETNHQILQSAEYRTPAEIAVKKFHVEDGHIRNQRGAYTHTFSRLDLLAEMELLFQRQTDLGNPHTSAKLLENLTALLMWQKPALAGEAILKMLGKCTFEPTEYKAAKNSYSAERFVWLTKLNNLRILEQGAERALTDNERFALLDQPYEKAKFTYAQARTMLALPDEAIFKGVRYQGEDKKAVETKTILMEMKAYHQIRKALENADLKAEWNELKNNSELLDDIGTAFSLHKTDEDICRYLDGKLSESILNALLENLNFDKFIQLSLKALQQILPLMLQGQRYDEAVSAIYGDHYGKKSAEINRLLPTIPADEIRNPVVLRTLTQARKVINAVVRLYGSPARIHIETGREVGKSYQDRKKLEKQQEDNRKQRESAVKKFKEYFPNFVGEPKGKDILKMRLYELQQAKCLYSGKSLELHRLLEKGYVEVDHALPFSRTWDDSFNNKVLVLANENQNKGNLTPYEWLDGKNNSEHWQNFVARVQTSGFSHTKKQRILSHKLDEKGFIERNLNDTRYVARFLCNFIADNMLLTGKGKRKVFASNGQITALLRGRWGLQKVRDDNDRHHALDAVVVACSTVVMQQKITRFVRYEEGNVFSGERIDRETGEIIPLHFPSPWAFFRENVEIRIFSENPKLELENRLPDYPQYNHEFVQPLFVSRMPTRKMTGQGHMETVKSAKRLDEGLSVLKVPLTQLKLSDLERMVNREREVTLYESLKARLEQFGNDPAKAFAEPFHKKGGAVVKAVRVEQTQKSGVLVRDGNGVADNASMVRVDVFTKGGKYFLVPIYTWQVAKGILPNKAVTANVDEIDWLEMDESYQFIFTMYPNDLVKVKLKKEEFFGYYGGLDRATGAIVIKEHDLEKSKGKQGIYRIGVKLALSFEKYQVDELGKNIRPCRPTKRQHVR

SEQ ID NO: 167 - protein, 1334 aa, Listeria monocytogenes
  CRISPR-associated endonuclease
  ref <308>: DATABASE ACCESSION NUMBER: YP_006680178, NCBI Gene Database
  ref <309>: DATABASE ENTRY DATE: 2013-06-11
MKNPYTIGLDIGTNSVGWAVLTDQYDLVKRKMKVAGNSDKKQIKKNFWGVRLFDDGQTAVDRRMNRTARRRIERRRNRISYLQEIFAVEMANIDANFFCRLNDSFYVDSEKRNSRHPFFATIEEEVAYHKNYRTIYHLREELVNSSEKADLRLVYLALAHIIKYRGNFLIEGALDTKNTSVDEVYKQFIQTYNQVFMSNIEEGALAKVEENTEVASILAGKFTRREKFERILRLYPGEKSTGMFAQFISLIVGNKGNFQKVFNLVEKTDIECAKDSYEEDLEALLAIIGDEYAELFVAAKNTYNAVVLSSIITVTATETNAKLSASMIERFDAHEKELGELKAFIKLHLPKQYQEIFNNAEIDGYAGYIDGKTKQVDFYKYLKTTLENVEGADYFITKIEEENFLRKQRTFDNGVIPHQLHLEELEAILHQQAKYYPFLREGYDKIKSLVTFRIPYFVGPLANGQSEFAWLTRKDDGEIRPWNIEEKVDFGKSAVDFIEKMTNKDTYLPKENVLPKHSLCYQKYMVYNELTKIRYIDDQGKTNYFSGREKQQIFNDLFKQKRKVKKKDLELFLRNINHIESPTIEGLEDSFNASYATYHDLLKVGLKQEILDNPLNTEILEDIVKILTVFEDKRMIKEQLEQFSDVLDGVVLKKLERRHYTGWGRLSAKLLVGIRDKQSHLTILDYLMNDDGLNRNLMQLINDSNLSFKSIIEKEQVSTTDKDLQSIVADLAGSPAIKKGILQSLKIVDELVSIMGYPPQTIVVEMARENQTTGKGKNNSKPRYKSLEKAIKDFGSQILKEHPTDNQELKNNRLYLYYLQNGKDIYTGQELDIHNLSNYDIDHIVPQSFITDNSIDNLVLTSSAGNREKGGDVPPLEIVRKRKVFWEKLYQGNLMSKRKFDYLTKAERGGLTEADKARFIHRQLVETRQITKNVANILHQRFNKETDNHGNTMEQVRIVTLKSALVSQFRKQFQLYKVREVNDYHHAHDAYLNGVVANTLLKVYPQLEPEFVYGEYHQFDWFKANKATAKKQFYTNIMLFFAQKERIIDENGEILWDKKYLETIKKVLDYRQINIVKKTEIQKGEFSKATIKPKGNSSKLIPRKENWDPVKYGGLDSPNMAYAVIIEHAKGKKKIVIEKKLIQINIMERKMFEKDEEAFLEEKGYHQPKVLTKLPKYTLYECEKGRRRMLSSANEAQKGNQLVLSNHLVSLLYHAKNCEASDGKSLKYIEAHRETFSELLAQVSEFATKYTLADANLSKINNLFEQNKEGDIKAIAQSFVDLMAFNAMGAPASFKFFEATIDRKRYTNLKELLSSTIIYQSITGLYESRKRLDD

SEQ ID NO: 168 - protein, 1334 aa, Listeria monocytogenes
  CRISPR-associated endonuclease
  ref <308>: DATABASE ACCESSION NUMBER: YP_006697432, NCBI Gene Database
  ref <309>: DATABASE ENTRY DATE: 2013-08-28
MKNPYTIGLDIGTNSVGWAVLTNQYDLVKRKMKVAGNSDKKQIKKNFWGVRLFDDGQTAVDRRMNRTARRRIERRRNRISYLQEIFAVEMANIDANFFCRLNDSFYVDSEKRNSRHPFFATIEEEVAYHKNYRTIYHLREELVNSSEKADLRLVYLALAHIIKYRGNFLIEGALDTKNTSVDGVYEQFIQTYNQVFMSNIEEGTLAKVEENIEVANILAGKFTRREKFERILQLYPGEKSTGMFAQFISLIVGSKGNFQKVFDLIEKTDIECAKDSYEEDLEALLAIIGDEYAELFVAAKNTYNAVVLSSIITVTATETNAKLSASMIERFDAHEKDLGELKAFIKLHLPKQYQEIFNNAAIDGYAGYIDGKTKQVDFYKYLKTILENIEGADYFIAKIEEENFLRKQRTFDNGAIPHQLHLEELEAIIHQQAKYYPFLREDYEKIKSLVTFRIPYFVGPLAKGQSEFAWLTRKADGEIRPWNIEEKVDFGKSAVDFIEKMTNKDTYLPKENVLPKHSLCYQKYMVYNELTKVRYIDDQGKTNYFSGQEKQQIFNDLFKQKRKVKKKDLELFLRNINHIESPTIEGLEDSFNASYATYHDLLKVGMKQEILDNPLNTEMLEDIVKILTVFEDKPMIKEQLQQFSDVLDGGVLKKLERRHYTGWGRLSAKLLVGIREKQSHLTILDYLMNDDGLNRNLMQLINDSNLSFKSIIEKEQVSTTDKDLQSIVADLAGSPAIKKGILQSLKIVDELVSIMGYPPQTIVVEMARENQTTGKGKNNSKPRYKSLEKAIKEFGSKILKEHPTDNQELKNNRLYLYYLQNGKDMYTGQELDIHNLSNYDIDHIVPQSFITDNSIDNLVLTSSAGNREKGGDVPPLEIVRKRKVFWEKLYQGNLMSKRKFDYLTKAERGGLTDADKARFIHRQLVETRQITKNVANILHQRFNNETDNHGNTMEQVRIVTLKSALVSQFRKQFQLYKVREVNDYHHAHDAYLNGVVANTLLKVYPQLEPEFVYGEYHQFDWFKANKATAKKQFYTNIMLFFGQKERIIDENGEILWDKKYLETIKKVLDYRQMNIVKKTEIQKGEFSKATIKPKGNSSKLIPRKENWDPMKYGGLDSPNMAYAVIIEHAKGKKKLIFEKKIIRITIMERKMFEKDEEAFLEEKGYRHPKVLTKLPKYTLYECEKGRRRMLASANEAQKGNQLVLSNHLVSLLYHAKNCEASDGKSLKYIEAHRETFSELLAQVSEFATRYTLADANLSKINNLFEQNKEGDIQAIAQSFVDLMAFNAMGAPASFKFFEATIDRKRYTNLKELLSSTIIYQSITGLYESRKRLDD

SEQ ID NO: 169 - protein, 1334 aa, Listeria monocytogenes; identical to SEQ ID NO: 167
  serotype 7
  CRISPR-associated endonuclease
  ref <308>: DATABASE ACCESSION NUMBER: YP_006694559, NCBI Gene Database
  ref <309>: DATABASE ENTRY DATE: 2013-06-11

SEQ ID NO: 170 - protein, 1334 aa, Listeria monocytogenes; identical to SEQ ID NO: 167
  CRISPR-associated endonuclease
  ref <308>: DATABASE ACCESSION NUMBER: YP_006683057, NCBI Gene Database
  ref <309>: DATABASE ENTRY DATE: 2013-06-11

SEQ ID NO: 171 - protein, 984 aa, Campylobacter jejuni; identical to SEQ ID NO: 64
  CRISPR-associated endonuclease
  ref <308>: DATABASE ACCESSION NUMBER: YP_006633648, NCBI Gene Database
  ref <309>: DATABASE ENTRY DATE: 2013-08-28

SEQ ID NO: 172 - protein, 1352 aa, Belliella baltica
  CRISPR-associated endonuclease
  ref <308>: DATABASE ACCESSION NUMBER: YP_006408468, NCBI Gene Database
  ref <309>: DATABASE ENTRY DATE: 2013-06-11
MKKILGLDLGTTSIGWAFIKEPEKDVVGSEIVDMGVRIVPLSSDEENDFAKGNTISINADRTLKRGARRNLQRFKQRRNALLEIFKEKKLISTNFKYAEDGPSSTFSTLNLRAKAAKEKIELQDLVKVLLQINKKRGYKSSRKAKSEEDDGSAIDSMGIAKELYENDLTPGQWVYEALQKGRKNVPDFYRSDLQEEFKKIVNYQSEFFPDIFNASFVEDWMGKASTPTKQYFNKKGVQLAENKGKREERRLQEYKWRAEAVNFKIDLSEIALILSQINSQISNSSGYLGAISDRSKELYFKNLTVGQYLYQQIKKNPHTRLKGQVFYRQDYLDEFERIWSVQSSFYPQLNDALKREVRDITIFFQRRLKSQKHLISNCEFEDHHKVVPKSHPVFQEFRIWQNLNNLLLIKKDNLNEKFDLELESKIALANELAFKRELNVKDALKILGLKPNEWEFNFTKIEGNRTNQAFFDAFAKIIELEDGEPIDLGDLKADDILDQFSEAFLRIGIDTELLQVNSDIEGAEYEKQSYIQFWHLLYSSEDDQKLKLNLIRKFGFKPEHAKILASISLQDDHASLSSRAIKKILPHLQSGLIYDKACTYAGYNHSSSFTKDENEKRELRAELELLKKNSLRNPVVEKILNQMINVVNAILKDPELGRPDEIRVEMARELKANAEQRKNMTSNIASATRDHDKYREILKSEFGLKRVTKNDLLRYKLWLETDGISLYTGKPIEASKLFSKEYDIEHIIPKARLFDDSFSNKTICERQLNIDKANVTAFSFLQNKLSADEFEQYQSRVKSLYGKLSKAKIQKLLMANDKIPEDFIARQLQETRYISKKAKEILFEISRRVSVTTGTITDKLREDWGLVEIMKELNWEKYDKLGLTYTIEGKHGERLNKIKDWSKRNDHRHHAMDALTVALTKPAYIQYLNNLNAKGLNNKKGTEVFAIEQKYLKRENGKLCFIPPIENIRSEAKKHLSRILVSYKAKNKVVTINKNKTKSKAGLNEQIALTPRGQLHKETVYGKSFHYSTKFEKIGASFNVQKINTVAKKEEREALLKRLAENGNDPKKAFTGKNTLNKMPIYLDLGKNIKLSEKVKTVVLEQNYTIRKNIDPDLKVDKVIDVGIKRILESRLEEFGGNAKLAFSNLEENPIWLNKEKGISIKRVKISGVSNVESLHVKKDHFGEPILDQEGNEIPVDFVSTGNNHHVAIYEDENGNLQEEVVSFFEAVVRQNQGLPIIKKNHTLGWKFLFTLKQNEYFVFPSDDFVPADVDLMDEQNYHLISPNLFRVQKIARKNYVFNNHLETKAVDNDLLKSKKELSKITYHFYQTPEHLRGIIKIRINHLGKIIQIGEY

SEQ ID NO: 173 - protein, 1646 aa, Francisella sp.
  Francisella cf. novicida
  CRISPR-associated endonuclease
  ref <308>: DATABASE ACCESSION NUMBER: YP_005824175, NCBI Gene Database
  ref <309>: DATABASE ENTRY DATE: 2013-06-11
MNIKILPIAIDLGAKNTGVFSAFYQKGTSLESLDNKNGKVYELSKDSYTLLMNNRTARRHQRRGIDRKQLVKRLFKLIWTKQLNLEWNKDTQQTISFLLNRRGFSFITDGYSPEYLNIAPEAVKAILMSILDDYNGEDDLDSYLQSATENDSKIDELYNKLLQKALEFKLRKLCIDIKEDKVTTKTLKELSNTEFKLLANYLVDYDRILRTQKFSYTDKQGNLRELNYYHHDKYNIQEFLKRNIIINDVILEKLTDDLDIWNLNFDKFDFEKNLEKLENQEDKDYLQTHLHHFVFAVNKIKSEMASGGRHRSQYFQEITNVLVENNHQEGYLKNFCENLHNKKYSNLSVKNLVNLIGNLSNLELKPLRKYFNDKIHAKADYWDEQKFAETYSDWILGEWRVGAKDKDKKDGAKYSYKNLCDELKQKVGINQDGIINQTKSDFVDFLLELDPCRTIPPYLDNNNRKPPKCQSLILNPKFLDNKYPNWQQYLQELKKLQTVQNYLGNFEIDLKDLKSSKEQPYFVKYKSLNQQIASGQRDYKDLDARVLQFIFDRVKASDELLLNEIYSHAKKLKQNTSSELEKLELCKKLDEVIANSQLSQILKSQHVNGIFEQGTFLHLVCKYYKQRQRARDSRLYIMPEYRYDKKLDKYNNTGRFDDDNQLLTYCNHKPRQKRYQLLNDLAGVLQVSPNFLKDKIGSDDDLFISKWLVEHIRGFKKACEDSLKIQKDNRGLLNHKINIARNTKGKCEKEIFNLICKIEGSEDKKGNYKHGLAYELGVLLFGEPNQASKLEFDRKIKKFNSIYSFAQIQQIAFAERKGNANTCAVCSADNAHRMQQIKVAKPVEGNKDNIILSAKAQRLPAIPTRIVDGAVKKIATILARNIVDDNWDNIKQALSNNQQLHVPIITESNAFEFEPALADIKGKSLKDKRKKALERIDPENVFKDKNNRIKEFAKGISAYSDANLANGDFDGAKEELDHIIPRSHKKYGTLNDEANLICVTREDNQNRGNKAVFLYDLKPNYKLKQFNTTDDLEIEKKIADTIWDASKQDFKFGNYRSFINLTPQEQIAFRHALFLADKNPIKKAVIRAIDNRNRTFVNGTQRYFAEVLANNIYLRAKKENLATNRITFDYFGIETTNSNGRGIADVRKLYEKVDSDIQAYAKGDKPQDSYSHLIDAMIAFCVAADEHKNEGSIGLKMGNQYGLFPTPDKYDENTGEIISWHNDDIFRKIKVSDNQFSDKKLVRKKATEGFNTHRQMTRDGIYGESYLPILIHKNLNEVRKGYNWENSEEIKIFKGKKYDIQQLNNLVYCLKFVDKPISIDIQITTLEELRNILETNNISTTAEYYYINLKTQKLHEYYIENYNTALGYKKYTKEMEFLRSLAYRTERVKIKSIDDVSMILAKDSNFKAGKIELPFKTEWQRLYLEWQNTTIKDNHEFLKSYFSVKNATKQHKKVRKDFSLPISTNEGKLLVKRKTWDNNFIYQILNDSDSRADGTKPFIPAFDISKNEIVETIIKSFTSKNIFWLPKNIELQKVDNKSIFAIDTSRWFEVETPKDLIEIGVSTIQYKIDNNSRPKVRVKLDYVMDDDSKINYFMNHSLLKSRYPDKVLEILKQSTIIEFESSGFNKTIKEMLGMTLAGIYNETSNN

SEQ ID NO: 174 - protein, 1380 aa, Prevotella intermedia
  CRISPR-associated endonuclease
  ref <308>: DATABASE ACCESSION NUMBER: YP_006298249, NCBI Gene Database
  ref <309>: DATABASE ENTRY DATE: 2013-06-11
MKRILGLDLGTTSIGWALVNEAENNNEASSIVRLGVRVNPLTVDEKSNFEKGKAITTNADRQLRHGARINLQRYKLRRQNLHDCLQKQGWLGTEAMYEEGKASTFETYKLRAKAAEEEISLHEFARVLFMLNKKRGYKSNRKANNKEDGQLFDGMTIAKKLYEEHLTPAEYSLQLLNKGKKFTQGYYRSDLNAELERIWDEQKKYYPEILTDEFKQQLEGKTKTNTSKIFLAKYGIYSADLKGLDRKFQPLKWRVEALQQQVDKEVLAFVISDLKGQIANTSGLLGAISDRSKELYFNKQTVGQYLWASLEENPHISIKNKPFYRQDYLDEFEKIWETQAAFHKQLTPELKQEIRDIIIFYQRPLKSKKSLISVCELEQRKVKATIDGKEKEITIGPKVAPKSSPVFQEFRIWQNLNNVLLIDNDTNEKRPLDEVERNLLYKELSIKAKLSKTEALKILNKKGKQWDLNYRELEGNRTQAILFDCYNRIITLTGHEECDFKKIKASEIRHYVSTIFKNLGFSTEILDFDPSLKKHELEKQPMYQLWHLLYSYESDNSRTGNESLLRKLETTFGFPEEYATVLCDVVFEEDYGNLSVKAMREILPYLQAGNDYSQACAYAGYNHSRHSLTKEELDQKVYKERLELLPKNSLRNPVVEKILNQMINVINAIIDEYGKPDEIRIEMARELKSSAADRKKTTHAISQGNAENQRIREILEKEFSLSYISRNDIIKYKLYEELEPNYYKTLYSDTYITKDKLFSKDFDIEHIIPKARLFDDSFSNKTLEARNINLEKSNKTAFDFIKEKYGEDGAEAYKKKLDMLLENDAISRPKYNNLLRAEADIPSDFINRDLRNTQYIAKKACEILGELVKTVTPTTGKITNRLREDWQLVDVMKELNFEKYEKLGLTEIVEDRDGRKIKRIKDWTKRNDHRHHAMDALAIAFTKPSFIQYLNNLNARSNKGDSIYAIENKELHYEEGKLRFNAPIPVNEFRAEAKRHLSAILVSIKAKNKVMTQNVNKIKTKHGIIKKIQLTPRGPLHNETIYGTKMRPIIKMVKVGAALDEATINKVSSPAIREALLKRLNEYSGNAKKAFTGKNTLEKNPIYLNAGRTKTVPSLVKTVEWESFHPTRKLIDKDLNVDKVVDKGIREILKARLEEFNGDAKKAFSNLEENPIYLDEAKKIALKRVSIEGVLSAIPLHTLKNQAGKPITGKDGKPVLGNYVQTSNNHHIAFYYDEDGNLQDNAVSFFEAAERKSQGIPVIDKDYNRDKGWRFLFTMKQNEYFVFPNEATGFIPSEVDLTDEANYGIISPNLYRVQKVSRIDKGTSASRDYWFRHHLETILNDDAKLKNLAFKRIRGLLELKDIIKVRINSTGKIVAVGEYD

SEQ ID NO: 175 - protein, 1121 aa, Streptococcus thermophilus
  CRISPR-associated endonuclease
  ref <308>: DATABASE ACCESSION NUMBER: YP_006040517, NCBI Gene Database
  ref <309>: DATABASE ENTRY DATE: 2013-06-11
MSDLVLGLDIGIGSVGVGILNKVTGEIIHKNSRIFPAAQAENNLVRRTNRQGRRLTRRKKHRIVRLNRLFEESGLITDFTKISINLNPYQLRVKGLTDELSNEELFIALKNMVKHRGISYLDDASDDGNSSVGDYAQIVKENSKQLETKTPGQIQLERYQTYGQLRGDFTVEKDGKKHRLINVFPTSAYRSEALRILQTQQEFNPQITDEFINRYLEILTGKRKYYHGPGNEKSRTDYGRYRTSGETLDNIFGILIGKCTFYPDEFRAAKASYTAQEFNLLNDLNNLTVPTETKKLSKEQKNQIINYVKNEKAMGPAKLFKYIAKLLSCDVADIKEYRIDKSGKAEIHTFEAYRKMKTLETLDIEQMDRETLDKLAYVLTLNTEREGIQEALEHEFADGSFSQKQVDELVQFRKANSSIFGKGWHNFSVKLMMELIPELYETSEEQMTILTRLGKQKTTSSSNKTKYIDEKLLTEEIYNPVVAKSVRQAIKIVNAAIKEYGDFDNIVIEMARETNEDDEKKAIQKIQKANKDEKDAAMLKAANQYNGKAELPHSVFHGHKQLATKIRLWHQQGERCLYTGKTISIHDLINNSNQFEVDHILPLSITFDDSLANKVLVYATANQEKGQRTPYQALDSMDDAWSFRELKAFVRESKTLSNKKKEYLLTEEDISKFDVRKKFIERNLVDTRYASRVVLNALQEHFRAHKIDTKVSVVRGQFTSQLRRHWGIEKTRDTYHHHAVDALIIAASIQLNLWKKQKNTLVSYSEDQLLDIETGELISDDEYKESVFKAPYQHFVDTLKSKEFEDSILFSYQVDSKFNRKISDATIYATRQAKVGKDKADETYVLGKIKDIYTQDGYDAFMKIYKKDKSKFLMYRHDPQTFEKVIEPILENYPNKQINEKGKEVPVNPFLKYKEEHGYIRKYSKKGNGPEIKSLKYYDSKLGNHIDITPKDSNNKVVLQSVSPWRADVYFNKTTGKYEILGLKYADLQFEKGTGTYKISQEKYNDIKKKEGVDSDSEFKFTLYKNDLLLVKDTETKEQQLFRFLSRTMPKQKHYVELKPYDKQKFEGGEALIKVLGNVANSGQCKKGLGKSNISIYKVRTDVLGNQHIIKNEGDKPKLDF

SEQ ID NO: 176 - protein, 1334 aa, Listeria monocytogenes
  CRISPR-associated endonuclease
  ref <308>: DATABASE ACCESSION NUMBER: YP_005966656, NCBI Gene Database
  ref <309>: DATABASE ENTRY DATE: 2013-06-11
MKNPYTIGLDIGTNSVGWAVLTNQYDLVKRKMKVAGNSDKKQIKKNFWGVRLFDDGQTAVDRRMNRTARRRIERRRNRISYLQEIFAVEMANIDANFFCRLNDSFYVDSEKRNSRHPFFATIEEEVAYHDNYRTIYHLREKLVNSSEKADLRLVYLALAHIIKYRGNFLIEGALDTKNTSVDEVYKQFIETYNQVFMSNIEEGALAKVEENIEVANILAGKFTRREKFERILQLYPGEKSTGMFAQFISLIVGSKGNFQKVFDLIEKTDIECAKDSYEEDLETLLAIIGDEYAELFVAAKNTYNAVVLSSIITVTDTETNAKLSASMIERFDAHEKDLVELKAFIKLNLPKQYEEIFSNAAIDGYAGYIDGKTKQVDFYKYLKTILENIEGSDYFIAKIEEENFLRKQRTFDNGAIPHQLHLEELEAIIHQQAKYYPFLKEDYDKIKSLVTFRIPYFVGPLANGQSEFAWLTRKADGEIRPWNIEEKVDFGKSAVDFIEKMTNKDTYLPKENVLPKHSLCYQKYMVYNELTKIRYIDDQGKTNYFSGREKQQVFNDLFKQKRKVKKKDLELFLRNINHIESPTIEGLEDSFNASYATYHDLLKVGMKQEILDNPLNTEMLEDIVKILTVFEDKPMIKEQLQQFSDVLDGGVLKKLERRHYTGWGRLSAKLLVGIREKQSHLTILDYLMNDDGLNRNLMQLINDSNLSFKSIIEKEQVSTTDKDLQSIVAELAGSPAIKKGILQSLKIVDELVSIMGYPPQTIVVEMARENQTTGKGKNNSKPRYKSLEKAIKEFGSQILKEHPTDNQELKNNRLYLYYLQNGKDMYTGQELDIHNLSNYDIDHIVPQSFITDNSIDNLVLTSSAGNREKGGDVPPLEIVRKRKVFWEKLYQGNLMSKRKFDYLTKAERGGLTEADKARFIHRQLVETRQITKNVANILYQRFNKETDNHGNTMEQVRIVTLKSALVSQFRKQFQLYKVREVNGYHHAHDAYLNGVVANTLLKVYPQLEPEFVYGEYHQFDWFKANKATAKKQFYTNIMLFFAQKERIIDENGEILWDKKYLETIKKVLDYRQMNIVKKTEIQKGEFSKATIKPKGNSSKLIPRKENWDPMKYGGLDSPNMAYAVIIEHAKGKKKIVIEKKLIQINIMERKMFEKDEEAFLEEKGYRHPKVLTKLPKYTLYECEKGRRRMLASANEAQKGNQLVLSNHLVSLLYHAKNCEASDGKSLKYIEAHRETFSELLAQVSEFATRYTLADANLSKINNLFEQNKEGDIKAIAQSFVDLMAFNAMGAPASFKFFEATIDRKRYTNLKELLSSTIIYQSITGLYESRKRLDD

SEQ ID NO: 177 - protein, 1334 aa, Listeria monocytogenes; identical to SEQ ID NO: 168
  CRISPR-associated endonuclease
  ref <308>: DATABASE ACCESSION NUMBER: YP_005963707, NCBI Gene Database
  ref <309>: DATABASE ENTRY DATE: 2013-06-11

SEQ ID NO: 178 - protein, 984 aa, Campylobacter jejuni
  CRISPR-associated endonuclease
  ref <308>: DATABASE ACCESSION NUMBER: YP_005656797, NCBI Gene Database
  ref <309>: DATABASE ENTRY DATE: 2013-06-11
MVRILAFDIGISSIGWAFSENDELKDCGVRIFTKVENPKTGESLALPRRLARSARKRLARRKARLNHLKHLIANEFKLNYEDYQSFDESLAKAYKGSLISPYELRFRALNELLSKQDFARVILHIAKRRGYDDIKNSDDKEKGAILKAIKQNEEKLANYQSVGEYLYKEYFQKFKENSKEFTNVRNKKESYERCIAQSFLKDELKLIFKKQREFGFSFSKKFEEEVLSVAFYKRALKDFSHLVGNCSFFTDEKRAPKNSPLAFMFVALTRIINLLNNLKNTEGILYTKDDLNALLNEVLKNGTLTYKQTKKLLGLSDDYEFKGEKGTYFIEFKKYKEFIKALGEHNLSQDDLNEIAKDITLIKDEIKLKKALAKYDLNQNQIDSLSKLEFKDHLNISFKALKLITPLMLEGKKYDEACNELNLKVAINEDKKDFLPAFNETYYKDEVTNPVVLRAIKEYRKVLNALLKKYGKVHKINIELAREVGKNHSQRAKIEKEQNENYKAKKDAELECEKLGLKINSKNILKLRLFKEQKEFCAYSGEKIKISDLQDEKMLEIDHIYPYSRSFDDSYMNKVLVFTKQNQEKLNKTPFEAFGNDSAKWQKIEVLAKNLPTKKQKRILDKNYKDKEQKDFKDRNLNDTRYIARLVLNYTKDYLDFLPLSDDENTKLNDTQKGSKVHVEAKSGMLTSALRHTWGFSTKDRNNHLHHAIDAVIIAYANNSIVKAFSDFKKEQESNSAELYAKKISELDYKNKRKFFEPFSGFRQKVLDKIDEIFVSKPERKKPSGALHEETFRKEEEFYQSYGGKEGVLKALELGKIRKVNGKIVKNGDMFRVDIFKHKKTNKFYAVPIYTMDFALKVLPNKAVARSKKGEIKDWILMDENYEFCFSLYKDSLILIQTKDMQEPEFVYYNAFTSSTVSLIVSKHDNKFETLSKNQKILFKNANEKEVIAKSIGIQNLKVFEKYIVSALGEVTKAEFRQREDFKK

SEQ ID NO: 179 - protein, 1367 aa, Streptococcus pyogenes
  CRISPR-associated endonuclease
  ref <308>: DATABASE ACCESSION NUMBER: YP_005411537, NCBI Gene Database
  ref <309>: DATABASE ENTRY DATE: 2013-07-06
MDKKYSIGLDIGTNSVGWAVITDDYKVPSKKFKVLGNTDRHSIKKNLIGALLFGSGETAEATRLKRTARRRYTRRKNRICYLQEIFSNEMAKVDDSFFHRLEESFLVEEDKKHERHPIFGNIVDEVAYHEKYPTIYHLRKKLADSTDKADLRLIYLALAHMIKFRGHFLIEGDLNPDNSDVDKLFIQLVQIYNQLFEENPINASRVDAKAILSARLSKSRRLENLIAQLPGEKRNGLFGNLIALSLGLTPNFKSNFDLAEDAKLQLSKDTYDDDLDNLLAQIGDQYADLFLAAKNLSDAILLSDILRVNSEITKAPLSASMIKRYDEHHQDLTLLKALVRQQLPEKYKEIFFDQSKNGYAGYIDGGASQEEFYKFIKPILEKMDGTEELLVKLNREDLLRKQRTFDNGSIPHQIHLGELHAILRRQEDFYPFLKDNREKIEKILTFRIPYYVGPLARGNSRFAWMTRKSEETITPWNFEEVVDKGASAQSFIERMTNFDKNLPNEKVLPKHSLLYEYFTVYNELTKVKYVTEGMRKPAFLSGEQKKAIVDLLFKTNRKVTVKQLKEDYFKKIECFDSVEISGVEDRFNASLGAYHDLLKIIKDKDFLDNEENEDILEDIVLTLTLFEDRGMIEERLKTYAHLFDDKVMKQLKRRRYTGWGRLSRKLINGIRDKQSGKTILDFLKSDGFANRNFMQLIHDDSLTFKEDIQKAQVSGQGHSLHEQIANLAGSPAIKKGILQTVKIVDELVKVMGHKPENIVIEMARENQTTQKGQKNSRERMKRIEEGIKELGSQILKEHPVENTQLQNEKLYLYYLQNGRDMYVDQELDINRLSDYDVDHIVPQSFIKDDSIDNKVLTRSDKNRGKSDNVPSEEVVKKMKNYWRQLLNAKLITQRKFDNLTKAERGGLSELDKAGFIKRQLVETRQITKHVAQILDSRMNTKYDENDKLIREVKVITLKSKLVSDFRKDFQFYKVREINNYHHAHDAYLNAVVGTALIKKYPKLESEFVYGDYKVYDVRKMIAKSEQEIGKATAKYFFYSNIMNFFKTEITLANGEIRKRPLIETNGETGEIVWDKGRDFATVRKVLSMPQVNIVKKTEVQTGGFSKESILPKRNSDKLIARKKDWDPKKYGGFDSPTVAYSVLVVAKVEKGKSKKLKSVKELLGITIMERSSFEKNPIDFLEAKGYKEVKKDLIIKLPKYSLFELENGRKRMLASAGELQKGNELALPSKYVNFLYLASHYEKLKGSPEDNEQKQLFVEQHKHYLDEIIEQISEFSKRVILADANLDKVLSAYNKHRDKPIREQAENIIHLFTLTNLGAPAAFKYFDTTIDRKRYTSTKEVLDATLIHQSITGLYETRIDLSQLGGD

SEQ ID NO: 180 - protein, 1367 aa, Streptococcus pyogenes; identical to SEQ ID NO: 179
  CRISPR-associated endonuclease
  ref <308>: DATABASE ACCESSION NUMBER: YP_005388840, NCBI Gene Database
  ref <309>: DATABASE ENTRY DATE: 2013-07-06

SEQ ID NO: 181 - protein, 1084 aa, Corynebacterium diphtheriae
  CRISPR-associated endonuclease
  ref <308>: DATABASE ACCESSION NUMBER: YP_005163828, NCBI Gene Database
  ref <309>: DATABASE ENTRY DATE: 2013-06-11
MKYHVGIDVGTFSVGLAAIEVDDAGMPIKTLSLVSHIHDSGLDPDEIKSAVTRLASSGIARRTRRLYRRKRRRLQQLDKFIQRQGWPVIELEDYSDPLYPWKVRAELAASYIADEKERGEKLSVALRHIARHRGWRNPYAKVSSLYLPDGPSDAFKAIREEIKRASGQPVPETATVGQMVTLCELGTLKLRGEGGVLSARLQQSDHAREIQEICRMQEIGQELYRKIIDVVFAAESPKGSASSRVGKDPLQPGKNRALKASDAFQRYRIAALIGNLRVWVDGEKRILSVEEKNLVFDHLVNLTPKKEPEWVTIAEILGIDRGQLIGTATMTDDGERAGARPPTHDTNRSIVNSRIAPLVDWWKTASALEQHAMVKALSNAEVDDFDSPERAKVQAFFADLDDDVHAKLDSLHLPVGRAAYSEDTLVRLTRRMLSDGVDLYTARLQEFGIEPSWTPPTPRIGEPVGNPAVDRVLKTVSRWLESATKTWGAPERVIIEHVREGFVTEKRAREMDGDMRRRAARNAKLFQEMQEKLNVQGKPSRADLWRYQSVQRQNCQCAYCGSPITFSNSEMDHIVPRAGQGSTNTRENLVAVCHRCNQSKGNTPFAIWAKNTSIEGVSVKEAVERTRHWVTDTGMRSTDFKKFTKAVVERFQRATMDEEIDARSMESVAWMANELRSRVAQHFASHGTTVRVYRGSLTAEARRASGISGKLEFLDGVGKSRLDRRHHAIDAAVIAFTSDYVAETLAVRSNLKQSQAHRQEAPQWREFTGKDAEHRATWRVWCQKMEKLSALLTEDLRDDRVVVMSNVRLRLGNGSAHEETIGKLSKVKLGSQLSVSDIDKASSEALWCALTREPDFDPKDGLPANPERHIRVNGTHVYAGDNIGLFPVSAGSIALRGGYAELGSSFHHARVYKITSGKKPAFAMLRVYTIDLLPYRNQDLFSVELKPQTMSMRQAEKKLRDALATGNAEYLGWLVVDDELVVDTSKIATDQVKAVEAELGTIRRWRVDGFFGDTRLRLRPLQMSKEGIKKESAPELSKIIDRPGWLPAVNKLFSEGNVTVVRRDSLGRVRLESTAHLPVTWKVQ

SEQ ID NO: 182 - protein, 1084 aa, Corynebacterium diphtheriae
  CRISPR-associated endonuclease
  ref <308>: DATABASE ACCESSION NUMBER: YP_005161490, NCBI Gene Database
  ref <309>: DATABASE ENTRY DATE: 2013-06-11
MKYHVGIDVGTFSVGLAAIEVDDAGMPIKTLSLVSHIHDSGLDPDKIKSAVTRLASSGIARRTRRLYRRKRRRLQQLDKFIQRQGWPVIELEDYSDPLYPWKVRAELAASYIADEKERGEKLSVALRHIARHRGWRNPYAKVSSLYLPDEPSDAFKAIREEIKRASGQPVPETATVGQMVTLCELGTLKLRGEGGVLSARLQQSDHAREIQEICRMQEIGQELYRKIIDVVFAAESPKGSASSRVGKDPLQPGKNRALKASDAFQRYRIAALIGNLRVRVDGEKRILSVEEKNLVFDHLVNLAPKKEPEWVTIAEILGIDRGQLIGTATMTDDGERAGARPPTHDTNRSIVNSRIAPLVDWWKTASALEQHAMVKALSNAEVDDFDSPEGAKVQAFFADLDDDVHAKLDSLHLPVGRAAYSEDTLVRLTRRMLADGVDLYTARLQEFGIEPSWTPPAPRIGEPVGNPAVDRVLKTVSRWLESATKTWGAPERVIIEHVREGFVTEKRAREMDGDMRRRAARNAKLFQEMQEKLNVQGKPSRADLWRYQSVQRQNCQCAYCGSPITFSNSEMDHIVPRAGQGSTNTRENLVAVCHRCNQSKGNTPFAIWAKNTSIEGVSVKEAVERTRHWVTDTGMRSTDFKKFTKAVVERFQRATMDEEIDARSMESVAWMANELRSRVAQHFASHGTTVRVYRGSLTAEARRASGISGKLEFLDGVGKSRLDRRHHAIDAAVIAFTSDYVAETLAVRSNLKQSQAHRQEAPQWREFTGKDAEHRAAWRVWCQKMEKLSALLTEDLRDDRVVVMSNVRLRLGNGSAHEETIGKLSKVKLGSQLSVSDIDKASSEALWCALTREPDFDPKDGLPANPERHIRVNGTHVYAGDNIGLFPVSAGSIALRGGYAELGSSFHHARVYKITSGKKPAFAMLRVYTIDLLPYRNQDLFSVELKPQTMSMRQAEKKLRDALATGNAEYLGWLVVDDELVVDTSKIATDQVKAVEAELGTIRRWRVDGFFGDTRLRLRPLQMSKEGIKKESAPELSKIIDRPGWLPAVNKLFSEGNVTVVRRDSLGRVRLESTAHLPVTWKVQ

SEQ ID NO: 183 - protein, 1084 aa, Corynebacterium diphtheriae
  CRISPR-associated endonuclease
  ref <308>: DATABASE ACCESSION NUMBER: YP_005159132, NCBI Gene Database
  ref <309>: DATABASE ENTRY DATE: 2013-06-11
MKYHVGIDVGTFSVGLAAIEVDDAGMPIKTLSLVSHIHDSRLDPDKIKSAVTRLASSGIARRTRRLYRRKRRRLQQLDKFIQRQGWPVIELEDYSDPLYPWKVRAELAASYIADEKERGEKLSVALRHIARHRGWRNPYAKVSSLYLPDEPSDAFKAIREEIKRASGQPVPETATVGQMVTLCELGTLKLRGEGGVLSARLQQSDHAREIQEICRMQEIGQELYRKIIDVVFAAESPKGSASSRVGKDPLQPGKNRALKASDAFQRYRIAALIGNLRVRVDGEKRILSVEEKNLVFDHLVNLAPKKEPEWVTIAEILGIDRGQLIGTATMTDDGERAGARPPTHDTNRSIVNSRIAPLVDWWKTASALEQHAMVKALSNAEVDDFDSPEGAKVQAFFADLDDDVHAKLDSLHLPVGRAAYSEDTLVRLTRRMLADGVDLYTARLQEFGIEPSWTPPAPRIGEPVGNPAVDRVLKTVSRWLESATKTWGAPERVIIEHVREGFVTEKRAREMDGDMRRRAARNAKLFQEMQEKLNIQGKPSRADLWRYQSVQRQNCQCAYCGSPITFSNSEMDHIVPRAGQGSTNTRENLVAVCHRCNQSKGNTPFAIWAKNTSIEGVSVKEAVERTRHWVTDTGMRSTDFKKFTKAVVERFQRVTMDEEIDARSMESVAWMANELRSRVAQHFASRGTTVRVYRGSLTAEARRASGISGKLEFLDGVGKSRLDRRHHAIDAAVIAFTSDYVAETLAVRSNLKQSQAHRQEAPQWREFTGKDAEHRAAWRVWCQKMEKLSALLTEDLRDDRVVVMSNVRLRLGNGSAHEETIGKLSKVKLGSQLSVSDIDKASSEALWCALTREPDFDPKDGLPANPERHIRVNGTHVYAGDNIGLFPVSAGSIALRGGYAELGSSFHHARVYKITSGKKPAFAMLRVYTIDLLPYRNQDLFSVELKPQTMSMRQAEKKLRDALATGNAEYLGWLVVDDELVVDTSKIATDQVKAVEAELGTIRRWRVDGFFGDTRLRLRPLQMSKEGIKKESAPELSKIIDRPGWLPAVNKLFSEGNVTVVRRDSLGRVRLESTAHLPVTWKVQ

SEQ ID NO: 184 - protein, 1084 aa, Corynebacterium diphtheriae
  CRISPR-associated endonuclease
  ref <308>: DATABASE ACCESSION NUMBER: YP_005156749, NCBI Gene Database
  ref <309>: DATABASE ENTRY DATE: 2013-08-28
MKYHVGIDVGTFSVGLAAIEVDDAGMPIKTLSLVSHIHDSGLDPDKMKSAVTRLASSGIARRTRRLYRRKRRRLQQLDKFIQRQGWPVIELEDYSDPLYPWKVRAELAASYIADEKERGEKLSVALRHIARHRGWRNPYAKVSSLYLPDEPSDAFKSIREEIKRASGQPVPETATVGQMVTLCELGTLKLRGEGGVLSARLQQSDHAREIQEICRMQEIGQELYRKIIDVVFAAESPKGSASSRVGKDPLQPGKNRALKASDAFQRYRIAALIGNLRVRVDGEKRILSVEEKNLVFDHLVNLAPKKEPEWVTIAEILGIDRGQLIGTATMTDDGERAGARPPTHDTNRSIVNSRIAPLVDWWKTASALEQHAMVKALSNAEVDDFDSPEGAKVQAFFADLDDDVHAKLDSLHLPVGRAAYSEDTLVRLTRRMLADGVDLYTARLQEFGIEPSWTPPAPRIGEPVGNPAVDRVLKTVSRWLESATKTWGAPERVIIEHVREGFVTEKRAREMDGDMRRRAARNAKLFQEMQEKLNVQGKPSRADLWRYQSVQRQNCQCAYCGSPITFSNSEMDHIVPRAGQGSTNTRENLVAVCHRCNQSKGNTPFAIWAKNTSIEGVSVKEAVERTRHWVTDTGMRSTDFKKFTKAVVERFQRATMDEEIDARSMESVAWMANELRSRVAQHFASHGTTVRVYRGSLTAEARRASGISGKLEFLDGVGKSRLDRRHHAIDAAVIAFTSDYVAETLAVRSNLKQSQAHRQEAPQWREFTGKDAEHRAAWRVWCQKMEKLSALLTEDLRDDRVVVMSNVRLRLGNGSAHEETIGKLSKVKLGSQLSVSDIDKASSEALWCALTREPDFDPKDGLPANPERHIRVNGTHVYAGDNIGLFPVSAGSIALRGGYAELGSSFHHARVYKITSGKKPAFAMLRVYTIDLLPYRNQDLFSVELKPQTMSMRQAEKKLRDALATGNAEYLGWLVVDDELVVDTSKIATDQVKAVEAELGTIRRWRVDGFFGDTRLRLRPLQMSKEGIKKESAPELSKIIDRPGWLPAVNKLFSEGNVTVVRRDSLGRVRLESTAHLPVTWKVQ

SEQ ID NO: 185 - protein, 1084 aa, Corynebacterium diphtheriae
  CRISPR-associated endonuclease
  ref <308>: DATABASE ACCESSION NUMBER: YP_005143942, NCBI Gene Database
  ref <309>: DATABASE ENTRY DATE: 2013-06-11
MKYHVGIDVGTFSVGLAAIEVDDAGMPIKTLSLVSHIHDSGLDPDKMKSAVTRLASSGIARRTRRLYRRKRRRLQQLDKFIQRQGWPVIELEDYSDPLYPWKVRAELAASYIADEKERGEKLSVALRHIARHRGWRNPYAKVSSLYLPDEPSDAFKSIREEIKRASGQPVPETATVGQMVTLCELGTLKLRGEGGVLSARLQQSDHAREIQEICRMQEIGQELYRKIIDVVFAAESPKGSASSRVGKDPLQPGKNRALKASDSFQRYRIAALISNLRVRVDGEKRILSVEEKNLVFDHLVNLAPKKEPEWVTIAEILGIDRGQLIGTATMTDDGERAGARPPTHDTNRSIVNSRIAPLVDWWKTASALEQHAMVKALSNAEVDDFDSPEGAKVQAFFADLDDDVHAKLDSLHLPVGRAAYSEDTLVRLTRRMLADGVDLYTARLQEFGIEPSWTPPAPRIGEPVGNPAVDRVLKTVSRWLESATKTWGAPERVIIEHVRDGFVTEKRAREMDGDMRRRAARNAKLFQEMQEKLNVQGKPSRADLWRYQSVQRQNCQCAYCGSPITFSNSEMDHIVPRAGQGSTNTRENLVAVCHRCNQSKGNTPFAIWAKNTSIEGVSVKEAVERTRHWVTDTGMRSTDFKKFTKAVVERFQRATMDEEIDARSMESVAWMANELRSRVAQHFASHGTTVRVYRGSLTAEARRASGISGKLEFLDGVGKSRLDRRHHAIDAAVIAFTSDYVAETLAVRSNLKQSQAHRQEAPQWREFTGKDAEHRAAWRVWCQKMEKLSALLTEDLRDDRVVVMSNVRLRLGNGSAHEETIGKLSKVKLGSQLSVSDIDKASSEALWCALTREPDFDPKDGLPANPERHIRVNGTHVYAGDNIGLFPVSAGSIALRGGYAELGSSFHHARVYKITSGKKPAFAMLRVYTIDLLPYRNQDLFSVELKPQTMSMRQAEKKLRDALATGNAEYLGWLVVDDELVVDTSKIATDQVKAVEAELGTIRRWRVDGFFGDTRLRLRPLQMSKEGIKKELAPELSKIIDRPGWLPAVNKLFSEGNVTVVRRDSLGRVRLESTAHLPVTWKVQ

SEQ ID NO: 186 - protein, 1084 aa, Corynebacterium diphtheriae; identical to SEQ ID NO: 92
  CRISPR-associated endonuclease
  ref <308>: DATABASE ACCESSION NUMBER: YP_005134835, NCBI Gene Database
  ref <309>: DATABASE ENTRY DATE: 2013-08-28

SEQ ID NO: 187 - protein, 876 aa, Corynebacterium diphtheriae; identical to SEQ ID NO: 91
  CRISPR-associated endonuclease
  ref <308>: DATABASE ACCESSION NUMBER: YP_005136892, NCBI Gene Database
  ref <309>: DATABASE ENTRY DATE: 2013-08-28

SEQ ID NO: 188 - protein, 1052 aa, Haemophilus parainfluenzae
  CRISPR-associated endonuclease
  ref <308>: DATABASE ACCESSION NUMBER: YP_004823543, NCBI Gene Database
  ref <309>: DATABASE ENTRY DATE: 2013-06-11
MENKNLHYILGLDLGIASVGWAVVEIDEKENPLRLIDVGVRTFERAETQKGESLALSRRSARSARRLTQRRVARLKKAKRLLKSENILLSTDERLPHQVWQLRVEGLDRKLERQEWAAVLLHLIKHRGYLSQRKNESKSENKELGALLSGVASNHELLQQATYRTPAELAVKKFEVEEGHIRNQQGAYTHTFSRLDLLAEMELLFSRQQHFGNPFASEKLLENLTALLMWQKPALSGEDILKMLGKCTFEDEYKAAKNTYTAERFVWITKLNNLRIQENGLERALSDNERLMLIEQPYEKAKLTYAQVRSILNLSDDAIFKGVRYSGEDKKAIETKTTLMEMKAYHQIRKVLEGNNLKAEWVALKANPTLLDEIGTAFSLYKTDEDISAYLAGKLSQPVLNALLENLSFDKFIQLSLKALYKLLPLMQQGLRYDEACREIYGDHYGKKTEETHHFLPQIPADEIRNPVVLRTLTQARKVINGVVRLYGSPARIHIETGREVGKSYKDRHELKKRQEENRKQREKTISEIKTLFPNFSGEPKGKDILKMRLYYQQNAKCLYSGKPLELHRLFEQKYVEVDHALPLSRTWDDSFNNKVLVLANENQNKGNLTPFEWLDGKNNSERWRTFKALVETSAFPYAKKQRILSQKLDEKGFIERNLNDTRYVARFLCNFIADNMHLTGEGKRKVFASNGQITALLRRRWGLAKSREDNDRHHALDAVLVACSTVAMQQKITRFVRFKAGDVFTGERIDRETGEIIPLHFPTPWQFFKQEVEIRIFSDNPKLELENRLPDRPQANHEFVQPLFVSRMPTRKMTGQGHMETVKSAKRLNEGISMIKMPLTKLKLKDLELMVNREREKDLYDALKTRLEAFNDDPAKAFAEPFMKKGGAIVKSVRVEQVQKSGVLVRQGNGVADNASMVRVDVFTKDGKYFLVPIYTWQVAKGILPNKAVIQGKDEEDWEDIDDATFQFSLHPNDLISVKTKKDEFLGYFNGLNRHTGGINIRTHDLEKSKGKQGIFEGIGVKIALSFEKYQIDELGKNIRLCKPSKRQPVR

SEQ ID NO: 189 - protein, 1025 aa, Unknown
  Description of Unknown: gamma proteobacterium sequence
  CRISPR-associated endonuclease
  ref <308>: DATABASE ACCESSION NUMBER: YP_003812627, NCBI Gene Database
  ref <309>: DATABASE ENTRY DATE: 2013-06-10
MGGYMPQLMRYRLALDIGSTSIGWAMIRLSMQNEPIAIIRMGVRIFSDGRNPKDGSSLAVTRRVARQMRRRRDRLLKRKTRLLNALVQKKFFPEDADARKALVVLNPYELRKEGLYRQLSGPEFGRALFHISQRRGFLSNRKTDKKDNDSSVLKKAIVDLRQQLEVENCQTIGEWLFKQQQSGKSVRARLRGKTQKDKAYDFYIDRAMIAHEFDTLWVSQAKYDPLLFNEDARAILRDILLYQRPLKPVKPGRCTLIPDESRAPLALPLTQQARIYQELNHLRITTPALGAQALTVAQRNTIAALLEKSDVTFVKIAKALGLTSTTEFNLQDIKRDRLKGNATAIILARNQYFGRRWHDFNADLQNLIVDKLVNEGSETALIEWLKANTDVDESAAERVSGVTLPEGYGSLSVAALRRLLPALKEDVVVYSEAVKRAGFDSHSALSLIEQTGELYQELPYYGEVLQRHVGFGSGDPNDSPERRFGKIANPTVHIGLNELRKIINALIKRYGNPAEVVVELARDLKLSREKRKEIQEEQKQRQDRNEKRIKDACEILGIDPLVIDRGKRREISQKMQLWDELNPKDAANRRCPYTGDQISIEKLLSAEVEIEHILPFSKTLDDSLNNKTVAMRRANRDKGNRTPYEAFGESLNPDYDYDAILQRASLMPREKRKRFASDGYQQWLRDDKDFLSRALNDTAYLSRIAKEYLTLICPPNSVRAIPGRMTAQLRAMFGLNRLLSEGGIKNREDHRHHAIDAAVIGVTDQGLLQKFSRASARTRELQLSRLVDDMPLPWDTYREHVTRALEHLVVSHKPDHGYQGKMHEDTAWGLRDNGQVTRRVRSEDGGPRQRLLENKNVVKINSTRDFSRHGIDEQGQVNAYKGYVGGSNYCIEIWIDEKGKWNSDVVSTFQAYQIVRELGEKAAWQKLRNPLLSLSAKPLVMRLIIDDVVKMQIAGQNKIMRVVKIAQNGQIFFAEHNEANVDARDKDKNNPFKYISKTAGSLQKAGGIHMAISPIGDARPVRYGR

SEQ ID NO: 190 - protein, 1368 aa, Streptococcus pyogenes [sequence omitted]

SEQ ID NO: 191 - protein, 1370 aa, Streptococcus agalactiae
  CRISPR-associated endonuclease
  ref <308>: DATABASE ACCESSION NUMBER: YP_007968536, NCBI Gene Database
  ref <309>: DATABASE ENTRY DATE: 2013-06-11
MNKPYSIGLDIGTNSVGWSIITDDYKVPAKKMRVLGNTDKEYIKKNLIGALLFDGGNTAADRRLKRTARRRYTRRRNRILYLQEIFAEEMSKVDDSFFHRLEDSFLVEEDKRGSKYPIFATMQEEKDYHEKFPTIYHLRKELADKKEKADLRLVYLALAHIIKFRGHFLIEDDRFDVRNTDIQKQYQAFLEIFDTSFENNHLLSQNVDVEAILTDKISKSAKKDRILAQYPNQKSTGIFAEFLKLIVGNQADFKKHFNLEDKTPLQFAKDSYDEDLENLLGQIGDEFADLFSAAKKLYDSVLLSGILTVTDLSTKAPLSASMIQRYDEHREDLKQLKQFVKASLPEKYQEIFADSSKDGYAGYIEGKTNQEAFYKYLSKLLTKQEDSEYFLEKIKNEDFLRKQRTFDNGSIPHQVHLTELKAIIRRQSEYYPFLKENQDKIEKILTFRIPYYVGPLARGNSDFAWMTRKTDDSIRPWNFEDLVDKEKSAEAFIHRMTNNDLYLPEEKVLPKHSLIYEKFTVYNELTKVRYKNEQGETYFFDSNVKQEIFDGVFKEHRKVSKKQLLDFLAKEFEEFRIVDVTGLDKENKAFNASLGTYHDLKKILDKDFLDNPDNESILEDIVQTITLFEDREMIKKRLENYKDLFTESQLKKLYRRHYTGWGRLSAKLINGIRDRESQKIILDYLISDGRANRNFMQLINDDGLSFKSIISKAQSGSHSDNLKEVVGELAGSPAIKKGILQSLKIVDELVKVMGYEPEQIVVEMARENQTTNQGRRNSRQRYKLLEDGVKNLASDLNGDILKEYPTDNQALQNERLFLYYLQNGRDMYTGEALDIDSLSQYDIDHIVPQAFIKDDSIDNRVLVSSAKNRGKSDDVPSIDIVKARKAFWKKLLDAKLISQRKYDNLTKAERGGLTPDDKAGFIQRQLVETRQITKHVARILDERFNNKVDDNNKPIRKVKIVTLKSNLVSNFRKEFGFYKIREVNNYHHAHDAYLNAVVAKAILTKYPQLEPEFVYGDYPKYNSYKTRKSATEKLFFYSNIMNFFKTKVTLADETVVVKDDIEVNNETGEIAWDKKKHFATVRKVLSYPQVNIVKKTEVQTGGFSKESILAHSNSDKLIPRKTKDIYLDPKKYGGFDSPIVAYSVLVLADIKKGKAQKLKTVKELIGITIMERERFEKNPSAFLESKGYLNIRTDKLIILPKYSLFELENGRRRLLASAGELQKGNELALPTQYMKFLYLASRYNESKGKPEEIEKKQEFVNQHVSYFDDILQLINDFSKRVILADANLEKINKLYSDNKDNTPVDELAKNIINLFTFTSLGAPAAFKFFDKSVDRKRYTSTKEVLDSTLIHQSITGLYETRIDLGKLGED

SEQ ID NO: 192 - protein, 1123 aa, Francisella tularensis; identical to SEQ ID NO: 115
  subsp. tularensis
  CRISPR-associated endonuclease
  ref <308>: DATABASE ACCESSION NUMBER: YP_005830750, NCBI Gene Database
  ref <309>: DATABASE ENTRY DATE: 2013-06-11

SEQ ID NO: 193 - protein, 1082 aa, Neisseria meningitidis
  CRISPR-associated endonuclease
  ref <308>: DATABASE ACCESSION NUMBER: YP_005879219, NCBI Gene Database
  ref <309>: DATABASE ENTRY DATE: 2013-06-11
MAAFKPNSINYILGLDIGIASVGWAMVEIDEEENPIRLIDLGVRVFERAEVPKTGDSLAMARRLARSVRRLTRRRAHRLLRTRRLLKREGVLQAANFDENGLIKSLPNTPWQLRAAALDRKLTPLEWSAVLLHLIKHRGYLSQRKNEGETADKELGALLKGVAGNAHALQTGDFRTPAELALNKFEKESGHIRNQRSDYSHTFSRKDLQAELILLFEKQKEFGNPHVSGGLKEGIETLLMTQRPALSGDAVQKMLGHCTFEPAEPKAAKNTYTAERFIWLTKLNNLRILEQGSERPLTDTERATLMDEPYRKSKLTYAQARKLLGLEDTAFFKGLRYGKDNAEASTLMEMKAYHAISRALEKEGLKDKKSPLNLSPELQDEIGTAFSLFKTDEDITGRLKDRIQPEILEALLKHISFDKFVQISLKALRRIVPLMEQGKRYDEACAEIYGDHYGKKNTEEKIYLPPIPADEIRNPVVLRALSQARKVINGVVRRYGSPARIHIETAREVGKSFKDRKEIEKRQEENRKDREKAAAKFREYFPNFVGEPKSKDILKLRLYEQQHGKCLYSGKEINLGRLNEKGYVEIDHALPFSRTWDDSFNNKVLVLGSENQNKGNQTPYEYFNGKDNSREWQEFKARVETSRFPRSKKQRILLQKFDEDGFKERNLNDTRYVNRFLCQFVADRMRLTGKGKKRVFASNGQITNLLRGFWGLRKVRAENDRHHALDAVVVACSTVAMQQKITRFVRYKEMNAFDGKTIDKETGEVLHQKTHFPQPWEFFAQEVMIRVFGKPDGKPEFEEADTLEKLRTLLAEKLSSRPEAVHEYVTPLFVSRAPNRKMSGQGHMETVKSAKRLDEGVSVLRVPLTQLKLKDLEKMVNREREPKLYEALKARLEAHKDDPAKAFAEPFYKYDKAGNRTQQVKAVRVEQVQKTGVWVRNHNGIADNATMVRVDVFEKGDKYYLVPIYSWQVAKGILPDRAVVQGKDEEDWQLIDDSFNFKFSLHPNDLVEVITKKARMFGYFASCHRGTGNINIRIHDLDHKIGKNGILEGIGVKTALSFQKYQIDELGKEIRPCRLKKRPPVR

SEQ ID NO: 194 - protein, 861 aa, Campylobacter jejuni
  CRISPR-associated endonuclease
  ref <308>: DATABASE ACCESSION NUMBER: YP_005658406, NCBI Gene Database
  ref <309>: DATABASE ENTRY DATE: 2013-06-11
MARILAFDIGISSIGWAFSENDELKDCGVRIFTKAENPKTGESLALPRRLARSARKRLARRKARLNHLKHLIANEFKLNYEDYQSFDESLAKAYKGSLISPYELRFRALNELLSKQDFARVILHIAKRRGYDDIKNNGDEEKSEILKAIKQNEEKLVNYQSVGEYLYKEYFQKFKENSKEFINVRNKKESYERCITQSFLKDELKLIFQKQREFGFSFSKKFEEEVLSVAFYKRALKDFSHLVGNCSFFTDEKRAPKNSPLAFMFVALTRIINILNNLKNTEGILYTKDDLNALLNEVLKNGTLTYKQTKKLLGLSDDYEFKGEKGTYFIEFKKYKEFIKALGEHNLSQDDLNEIAKDITLIKDEIKLKKALAKYDLNQNQIDSLSKLEFKDHLNISFKALKLITPLMLEGKKYDEACNELNLKVAINEDKKDFLPAFNETYYKDEVTNPVVLRAIKEYRKILNALLKKYGKVHKINIELAREVGKNHSQRAKIEKEQNENYKAKKDAEIECEKLGLKINSKNILKLRLFKEQKEFCAYSGEKIKLSDLQDEKMLEIDHIYPYSRSFDDSYMNKVLVFTKQNQEKLNKTPFEAFGNDSTKWQKIEVLAKNLPEKKQKRILDKNYKDKEQKDFKDRNLNDTRYIARLVLNYTKDYLDFLPLSDDENTKLNDTQKGSKVHVEAKSGMLTSALRHTWGFSAKDRNNHLHHAIDAAIIAYANNSIVKAFSDFKKEQESNSVELYAKKISELDYKNKRKFFEPFSGFRQKVLDKIDEIFVSKPERKKPSGALHEETFRKEEEFYQSYGGKEGVLKALELGKIRKVNGKIVKNGDMFRVDIFKHKKTNKFLCCANLYYGFCFKSITK

SEQ ID NO: 195 - protein, 1123 aa, Francisella tularensis; identical to SEQ ID NO: 115
  CRISPR-associated endonuclease
  ref <308>: DATABASE ACCESSION NUMBER: YP_005305300, NCBI Gene Database
  ref <309>: DATABASE ENTRY DATE: 2013-07-06

SEQ ID NO: 196 - protein, 1082 aa, Neisseria meningitidis
  CRISPR-associated endonuclease
  ref <308>: DATABASE ACCESSION NUMBER: YP_005891308, NCBI Gene Database
  ref <309>: DATABASE ENTRY DATE: 2013-06-11
MAAFKPNPINYILGLDIGIASVGWAMVEIDEDENPICLIDLGVRVFERAEVPKTGDSLAMARRLARSVRRLTRRRAHRLLRARRLLKREGVLQAADFDENGLIKSLPNTPWQLRAAALDRKLTPLEWSAVLLHLIKHRGYLSQRKNEGETADKELGALLKGVADNAHALQTGDFRTPAELALNKFEKESGHIRNQRGDYSHTFSRKDLQAELILLFEKQKEFGNPHVSGGLKEGIETLLMTQRPALSSDAVQKMLGHCTFEPAEPKAAKNTYTAERFIWLTKLNNLRILEQGSERPLTDTERATLMDEPYRKSKLTYAQARKLLGLEDTAFFKGLRYGKDNAEASTLMEMKAYHAISRALEKEGLKDKKSPLNLSPELQDEIGTAFSLFKTDEDITGRLKDRIQPEILEALLKHISFDKFVQISLKALRRIVPLMEQGKRYDEACAEIYGDHYGKKNTEEKIYLPPIPADEIRNPVVLRALSQARKVINGVVRRYGSPARIHIETAREVGKSFKDRKEIEKRQEENRKDREKAAAKFREYFPNFVGEPKSKDILKLRLYEQQHGKCLYSGKEINLGRLNEKGYVEIDHALPFSRTWDDSFNNKVLVLGSENQNKGNQTPYEYFNGKDNSREWQEFKARVETSRFPRSKKQRILLQKFDEDGFKERNLNDTRYVNRFLCQFVADRMRLTGKGKKRVFASNGQITNLLRGFWGLRKVRAENDRHHALDAVVVACSTVAMQQKITRFVRYKEMNAFDGKTIDKETGEVLHQKTHFPQPWEFFAQEVMIRVFGKPDGKPEFEEADTPEKLRTLLAEKLSSRPEAVHEYVTPLFVSRAPNRKMSGQGHMETVKSAKRLDEGVSVLRVPLTQLKLKDLEKMVNREREPKLYEALKARLEAHKDDPAKAFAEPFYKYDKAGNRTQQVKAVRVEQVQKTGVWVRNHNGIADNATMVRVDVFEKGDKYYLVPIYSWQVAKGILPDRAVVQGKDEEDWQLIDDSFNFKFSLHPNDLVEVITKKARMFGYFASCHRGTGNINIRIHDLDHKIGKNGILEGIGVKTALSFQKYQIDELGKEIRPCRLKKRPPVR

SEQ ID NO: 197 - protein, 1082 aa, Wolinella succinogenes; identical to SEQ ID NO: 196
  CRISPR-associated endonuclease
  ref <308>: DATABASE ACCESSION NUMBER: YP_005891308, NCBI Gene Database
  ref <309>: DATABASE ENTRY DATE: 2013-06-11

SEQ ID NO: 198 - protein, 58 aa, Thielavia terrestris
  CRISPR-associated endonuclease
  ref <308>: DATABASE ACCESSION NUMBER: XP_003657788, NCBI Gene Database
  ref <309>: DATABASE ENTRY DATE: 2012-01-04
MAALDDGFEALLEPFYNGKKLTDPISTKEDKYQLLPAFLKVKGGSTSNRRGAALIHPR

SEQ ID NO: 199 - protein, 151 aa, Xanthomonas axonopodis; identical to SEQ ID NO: 155
  Xac29-1
  ref <308>: DATABASE ACCESSION NUMBER: YP_007637705, NCBI Gene Database
  ref <309>: DATABASE ENTRY DATE: 2013-08-28

SEQ ID NO: 200 - protein, 1368 aa, Streptococcus pyogenes; identical to SEQ ID NO: 133
  CRISPR-associated endonuclease
  ref <308>: DATABASE ACCESSION NUMBER: YP_007587356, NCBI Gene Database
  ref <309>: DATABASE ENTRY DATE: 2013-09-25

SEQ ID NO: 201 - protein, 73 aa, Millerozyma farinosa
  CRISPR-associated endonuclease
  ref <308>: DATABASE ACCESSION NUMBER: XP_004204917, NCBI Gene Database
  ref <309>: DATABASE ENTRY DATE: 2013-02-06
MARGNQRELARQKNLKKQQEAAKSKRKEGSAAKRMESDAEKMRQKQAAGMWISYVLSDDDSSLEKNNFTNCTS

SEQ ID NO: 202 - protein, 1400 aa, Riemerella anatipestifer; identical to SEQ ID NO: 123
  CRISPR-associated endonuclease
  ref <308>: DATABASE ACCESSION NUMBER: YP_007355826, NCBI Gene Database
  ref <309>: DATABASE ENTRY DATE: 2013-06-11

SEQ ID NO: 203 - protein, 1371 aa, Streptococcus dysgalactiae
  CRISPR-associated endonuclease
  ref <308>: DATABASE ACCESSION NUMBER: YP_006904759, NCBI Gene Database
  ref <309>: DATABASE ENTRY DATE: 2013-08-28
MDKKYSIGLDIGTNSVGWAVITDDYKVPSKKFKVLGNTDRHSIKKNLIGALLFDSGETAEATRLKRTARRRYTRRKNRIRYLQEIFSSEMSKVDDSFFHRLEESFLVEEDKKHERHPIFGNIVDEVAYHEKYPTIYHLRKKLADSTDKADLRLIYLALAHMIKFRGHFLIEGDLNPDNSDMDKLFIQLVQTYNQLFEENPINASRVDAKAILSARLSKSRRLENLIAQLPGEKRNGLFGNLIALSLGLTPNFKSNFDLAEDAKLQLSKDTYDDDLDNLLAQIGDQYADLFLAAKNLSDAILLSDILRVNSEITKAPLSASMIKRYDEHHQDLTLLKALVRQQLPEKYKEIFFDQSKNGYAGYIDGGASQEEFYKFIKPILEKMDGTEELLAKLNREDLLRKQRTFDNGSIPHQIHLGELHAILRRQEDFYPFLKDNREKIEKILTFRIPYYVGPLARGNSRFAWMTRKSEETITPWNFEEVVDKGASAQSFIERMTNFDKNLPNEKVLPKHSLLYEYFTVYNELTKVKYVTEGMRKPEFLSGKQKEAIVDLLFKTNRKVTVKQLKEDYFKKIECFDSVEISGVEDRFNASLGTYHDLLKIIKDKDFLDNEENEDILEDIVLTLTLFEDKEMIEERLKKYANLFDDKVMKQLKRRHYTGWGRLSRKLINGIRDKQSGKTILDFLKSDGFANRNFMQLINDDSLTFKEAIQKAQVSGQGHSLHEQIANLAGSPAIKKGILQSVKVVDELVKVMGHKPENIVIEMARENQTTQKGQKNSRERMKRIEEGIKELGSQILKEHPVENTQLQNEKLYLYYLQNGRDMYVDQELDINRLSDYDVDHIVPQSFIKDDSIDNKVLTRSDKNRGKSDNVPSEEVVKKMKNYWRQLLNAKLITQRKFDNLTKAERGGLSELDKAGFIKRQLVETRQITKHVAQILDSRMNTKYDENDKLIREVKVITLKSKLVSDFRKDFQFYKVREINNYHHAHDAYLNAVVGTALIKKYPKLESEFVYGDYKVYDVRKMIAKSEQEIGKATAKRFFYSNIMNFFKTEITLANGEIRKRPLIETNEETGEIVWDKGRDFATVRKVLSMPQVNIVKKTEVQTGALTNESIYARGSFDKLISRKHRFESSKYGGFGSPTVTYSVLVVAKSKVQDGKVKKIKTGKELIGITLLDKLVFEKNPLKFIEDKGYGNVQIDKCIKLPKYSLFEFENGTRRMLASVMANNNSRGDLQKANEMFLPAKLVTLLYHAHKIESSKELEHEAYILDHYNDLYQLLSYIERFASLYVDVEKNISKVKELFSNIESYSISEICSSVINLLTLTASGAPADFKFLGTTIPRKRYGSPQSILSSTLIHQSITGLYETRIDLSQLGGD

SEQ ID NO: 204 - protein, 1370 aa, Streptococcus agalactiae; identical to SEQ ID NO: 132
  CRISPR-associated endonuclease
  ref <308>: DATABASE ACCESSION NUMBER: YP_006764109, NCBI Gene Database
  ref <309>: DATABASE ENTRY DATE: 2013-06-11

SEQ ID NO: 205 - protein, 1629 aa, Francisella sp.
  Francisella cf. novicida
  CRISPR-associated endonuclease
  ref <308>: DATABASE ACCESSION NUMBER: YP_005825670, NCBI Gene Database
  ref <309>: DATABASE ENTRY DATE: 2013-06-11
MNFKILPIAIDLGVKNTGVFSAFYQKGTSLERLDNKNGKVYELSKDSYTLLMNNRTARRHQRRGIDRKQLVKRLFKLIWTEQLNLEWDKDTQQAISFLFNRRGFSFITDGYSPEYLNIVPEQVKAILMDIFDDYNGEDDLDSYLKLATEQESKISEIYNKLMQKILEFKLRKLCTDIKDDKVSTKTLKEITSYEFELLADYLANYSEILKTQKFSYTDKQGNLKELSYYHHDKYNIQEFLKRHATINIQILDTLLTDDLDIWNFNFEKFDFDKNEEKLQNQEDKDHIQAHLHHFVFAVNKIKSEMASGGRHRSQYFQEITNVLDENNHQEGYLKNFCENLHNKKYSNLSVKNLVNLIGNLSNLELKPLRKYFNDKIHAKADHWDEQKFTETYCHWILGEWRVGVKDQDKKDGAKYSYKDLCNELKQKVTKAGLVDFLLELDPCRTIPPYLDNNNRKPPKCQSLILNPKFLDNQYPNWQQYLQELKKLQSIQNYLESFETDLKVLKSSKDQPYFVEYRSSNQQIASGQRDYKDLDARILQFIFDRVKASDELLLNEIYFQAKKLKQKASSELEKLESSKKLDEVIANSQLSQILKSQHTNGIFEQGTFLHLVCKYYKQRQRARDSRLYIMPEYRYDKKLHKYNNTGRFDDDNQLLTYCNHKPRQKRYQLLNDLAGVLQVSPNFLKDKIGSDDDLFISKWLVEHIRGFKKACEDSLKIQKDNRGLLNHKINIARNTKGKCEKEIFNLICKIEGSEDKKGNYKHGLAYELGVLLFGEPNEASKPEFDRKIKKFNSIYSFAQIQQIAFAERKGNANTCAVCSADNAHRMQQIKITEPVEDNKDKIILSAKAQRLPAITTRIVDGAVKKMATILAKNIVDDNWQNIKQVLSAKHQLHIPIITESNAFEFEPALADVKGKSLKDRRKKALERISPENIFKDKNNRIKEFAKGISAYSGANLTDGDFDGAKEELDHIIPRSHKKYGTLNDEANLICVTRGDNKNKGNRIFCLRDLANNYKLKQFETTDDLEIEKKIADTIWDANKKDFKFGNYRSFINLTPQEQKAFRHALFLADENPIKQAVIRAINNRNRTFVNGTQRYFAEVLANNIYLRAKKENLNTDKISFDYFGIPTIGNGRGIAEIRQLYEKVDSDIQAYAKGDKPQASYSHLIDAMLAFCIAADEHRNDGSIGLEIDKNYSLYPLDKNTGEVFTKDIFSQIKITDNEFSDKKLVRKKATEGFNTHRQMTRDGIYAENYLPILIHKELDEVRKGYTWKNSEEIKIFKGKKYDIQQLNNLLYCLKFVDKPISIDIQISTLEELRNILTTNNIAATAEYYYINLKTQKLHEYYIENYNTALGYKKYTKEMEFLRSLAYRSERVKIKSIDDVKQVLDKDSNFIIGKITLPFKKEWQRLYREWQNITIKDDYEFLKSFFNVKSITKLHKKVRKDFSLPISTNEGKFLVKRKTWDNNFIYQILNDSDSRVDGTKPFIPAFDISKNEIVEAIIDSFTSKNIFWLPKNIELQKVDNKNIFAIDTSKWFEVETPSDLRDIGVATIQYKIDNNSRPKVRVKLDYVIDDDSKINYFTNHSLLKSRYPDKVLEILKQSTIIEFESSGFNKTIKEMLGMTLAGIYNETSNN

SEQ ID NO: 206 - protein, 1123 aa, Francisella tularensis; identical to SEQ ID NO: 115
  CRISPR-associated endonuclease
  ref <308>: DATABASE ACCESSION NUMBER: YP_005317754, NCBI Gene Database
  ref <309>: DATABASE ENTRY DATE: 2013-07-06

SEQ ID NO: 207 - protein, 393 aa, Francisella tularensis
  CRISPR-associated endonuclease
  ref <308>: DATABASE ACCESSION NUMBER: YP_513993, NCBI Gene Database
  ref <309>: DATABASE ENTRY DATE: 2013-06-10
MNVKILPIAIDLDVKNTGVFSAFYQKGTSLEKLDNKNGKVYELSKDSYTLLMNNRTAQRHQRRGIDRKQLVKRLFKLVWTEQLNLEWDKDTQQAISFLFNRRGFSFITDGYSTEYLNIVPEQVKAILMDIFDDYNGEDDLDSYLKLATEQESKISEIYNKLMQKILEFKLRKLCTDIKDDKVSTKTLKEITSYEFELLADYLANYSESLKTQKFSYTDKQGNLKELSYYHHDKYNIQEFLKRHATINDEILDTLLTDDFDIWNFNFEKFDFDKNEEKLQSQEDKDHTQAYFHHFVFAVNKIKSEMASGGRHRSQYFQEITNVLDENNHQEGYLKNFCENLHNKKYSNLSVKNLVNLVGNLSNLELKPLRKYFNDKNLIIGMSKSLQKLIATGY

SEQ ID NO: 208 - protein, 158 aa, Francisella tularensis
  CRISPR-associated endonuclease
  ref <308>: DATABASE ACCESSION NUMBER: YP_513992, NCBI Gene Database
  ref <309>: DATABASE ENTRY DATE: 2013-06-10
MIDFLLELDPCITIPPYLDNNNRKPPKCQSLILNPKFLDNQYPNWQQYLQELKKLQSIQDYLDSFETDLKDLKSSKDQPYFVEYKSSNQQMASGQRDYKDLDARILQFIFDRVKASDELLLSEIYFQAKKLKQKASSELEKLESSKKLDEVIANSQLS
